(19) United States
(12) Patent Application Publication
(10) Pub. No.: US 2022/0259682 A1
(43) Pub. Date: Aug. 18, 2022

(54) Systems, Methods, And Compositions For The Rapid Early-Detection of Host RNA Biomarkers of Infection And Early Identification of COVID-19 Coronavirus Infection in Humans

(71) Applicant: The Regents of the University of Colorado, a body corporate, Denver, CO (US)

(72) Inventors: Sara L. Sawyer, Boulder, CO (US); Nicholas R. Meyerson, Broomfield, CO (US); Camile L. Paige, Westminster, CO (US); Qing Yang, Longmont, CO (US); Robin Dowell, Broomfield, CO (US)

(21) Appl. No.: 17/686,387

(22) Filed: Mar. 3, 2022

Related U.S. Application Data
(63) Continuation-in-part of application No. PCT/US2020/049290, filed on Sep. 3, 2020.
(60) Provisional application No. 63/006,570, filed on Apr. 7, 2020.
(60) Provisional application No. 62/934,754, filed on Nov. 13, 2019.
(60) Provisional application No. 62/895,387, filed on Sep. 3, 2019.

(51) Int. Cl. C12Q 1/70; C12Q 1/6804

(52) U.S. Cl. CPC C12Q 1/701; C12Q 1/6844; C12Q 1/6804

(57) ABSTRACT

The current inventive technology is directed to systems, methods, and compositions detection of host signatures of pathogenic infection, and in particular a rapid detection assay configured to detect target RNA transcripts that may be biomarkers of infection. In one embodiment, the invention includes systems, methods and compositions for the early detection of pathogens or infection in an asymptomatic subject through a novel lateral flow assay, which in a preferred embodiment may include a rapid self-administered test strip configured to detect one or more RNA transcript biomarkers produced by a subject's innate immune system in response to a pathogen or infection and present in saliva.

[0001] This application claims the benefit of and priority to U.S. Provisional Application No. 62/895,387, filed Sep. 3, 2019, and U.S. Provisional Application No. 62/934,754, filed Nov. 13, 2019, and U.S. Provisional Application No. 63/006,570, filed Apr. 7, 2020. The entire specification and figures of the above-referenced applications are hereby incorporated, in their entirety by reference.

### SEQUENCE LISTING

[0002] The instant application contains a Sequence Listing which has been submitted electronically in ASCII format and is hereby incorporated by reference in its entirety. Said ASCII copy, created on Aug. 30, 2020, is named “90245.00432-Sequence-Listing.txt” and is 2476 Kbytes in size.

### STATEMENT OF FEDERALLY SPONSORED RESEARCH

[0003] This invention was made with government support under grant number HDTRA1-18-1-0032 awarded by Defense Threat Reduction Agency (DTRA). The government has certain rights in the invention.

### TECHNICAL FIELD

[0004] The current inventive technology is directed to systems, methods, and compositions detection of host signatures of pathogenic infection, and in particular a rapid detection assay configured to detect target RNA transcripts that may be biomarkers of infection.

### BACKGROUND

[0005] Early detection of infection by pathogenic microorganisms is vital for proper treatment and positive clinical outcomes. However, infected individuals may remain asymptomatic for several days post-infection while actively transmitting the pathogen to others. Traditional pathogen detection systems are often not effective at detecting the infection until after the onset of symptoms. Traditional pathogen testing includes serology or antibody-based tests, bacterial/viral/fungal growth cultures, and nucleic acid-based detection such as PCR (polymerase chain reaction). Such traditional tests are often time and labor intensive and are only effective after a patient has begun to show symptoms of the infection. Additionally, traditional diagnostic tests require clinical suspicion for a specific pathogen, expensive laboratory equipment, trained personnel, and have increased upstream and end-user costs.

[0006] For example, as highlighted in FIG. 2, in a typical infection course exposure to an unknown pathogen occurs at day zero and then progresses through subsequent clinical stages of infection as indicated by the timeline running vertically along the left side of the figure. As the pathogen replicates within the infected person, standard diagnostic tests are typically designed to work after the onset of symptoms, when people know there is something wrong and seek healthcare and diagnosis. However, at that point the person may have been contagious to others for several days or weeks. The opportunity to implement early quarantine and limit destructive downstream effects of unimpeded pathogen transmission has passed. This time delay to diagnosis can result in poorer patient outcomes and ongoing disease transmission before patients know they are contagious.

[0007] As opposed to the specialized, and later developing adaptive immune response, a host's first line of defense against pathogenic microorganisms is the “innate immune” response. The body's innate immunity is a self-amplifying and non-specific physiological response that occurs within hours of infection. As such, the ability to detect the presence of molecules produced by a host's innate immune response may provide the ability to rapidly detect infection at the earliest stages while a patient is still asymptomatic. Such advancement would allow for more effective quarantine protocols, as well as improved treatment and clinical outcomes.

[0008] The need for improved methods of detecting pathogens, especially early in the infection cycle, has been magnified by the worldwide coronavirus pandemic. Specifically, in 2019, a novel coronavirus identified as COVID-19, having a high infection and mortality rate, emerged in the Wuhan region of China and later spread throughout the world resulting in sever public health crisis. Coronaviruses, members of the Coronaviridae family and the Coronavirinae subfamily, are found in mammals and birds. A prominent member is severe acute respiratory syndrome coronavirus (SARS-CoV), which killed almost 10% of the affected individuals during an outbreak in China between 2002 and 2003. Another prominent coronaviruses called Middle East Respiratory Syndrome Coronavirus (MERS coronavirus or MERS-CoV) MERS-CoV shares some similarities with the SARS-CoV outbreak. Typical symptoms of a SARS. MERS and COVID-19 coronavirus infection include fever, cough, shortness of breath, pneumonia and gastrointestinal symptoms. Severe illness can lead to respiratory failure that requires mechanical ventilation and support in an intensive care unit. Both coronavirus appears to cause more severe disease in older people, people with weakened immune systems and those with chronic diseases, such as cancer, chronic lung disease and diabetes. At present no vaccine or specific treatment is available for COVID-19. Patients diagnosed with a COVID-19 coronavirus infection merely receive supportive treatment based on the individual's symptoms and clinical condition.

[0009] As outlined below, the present inventors have overcome the limitations of traditional pathogen detection systems while leveraging the host's early innate immune response (including but not exclusive to the interferon response) to rapidly detect RNA biomarkers indicative of infection, and particular infection with COVID-19 coronavirus. This rapid point-of-care diagnostic application allows detection of infection at the earlies stages when patients are typically asymptomatic. Such early detection is directly correlated with more targeted and effective therapeutic interventions as well as overall improved clinical outcomes.

### SUMMARY OF THE INVENTION

[0010] The inventive technology may include systems, methods and compositions for the early detection of pathogens and/or infection in an asymptomatic subject through a novel lateral flow assay, which in a preferred embodiment may include a rapid test strip configured to detect one or more RNA transcript biomarkers produced by a subject's innate immune system in response to a pathogen or infection and present in saliva.

[0011] In another aspect the inventive technology may include systems, methods and compositions for the early detection of pathogens and/or infection in an asymptomatic subject through a novel lateral flow assay, which in a preferred embodiment may include a rapid test strip configured to detect one or more RNA transcript biomarkers encoded by one or more of the nucleotide sequences according to SEQ ID NOs. 1-444, and 657-865 produced by a subject's innate immune system in response to a pathogen or infection, and which may be present in saliva.

[0012] Additional aspects of the invention include the use of one or more biomarkers for infection, and preferably pathogen infection in humans according to the nucleotide sequences identified in SEQ ID NOs. 1-444, and 657-865.

[0013] In another aspect, the inventive technology may include systems, methods and compositions for the detection of these target RNA transcripts, which may act as biomarkers for early-infection in a subject.

[0014] In another aspect, the inventive technology may include systems, methods and compositions for the detection of early-infection in a subject which may include at least: a lateral flow assay test strip device (1) which may preferably include a fibrous or paper-based lateral flow strip (2) configured to allow liquid flow via capillary action; 2) a RT-RPA (reverse transcription recombinase polymerase amplification) reaction which may occur in a pre-prepared reaction cylinder, which may include a collective container configured to receive a fluid sample from a subject and pre-prepared to perform a RT-RPA reaction; and 3) one or more RNA biomarkers transcripts, for example one or more biomarkers encoded by the nucleotide sequences identified as SEQ ID NOs. 1-444, and 657-865, also generally referred to as biomarkers, supplied in a fluid sample, which in a preferred embodiment may include a saliva sample provided by a subject. In a preferred embodiment, an RNA biomarkers transcript may be amplified in a reaction cylinder (3) in an isothermal amplification RT-RPA reaction to form either a hybrid dsDNA probe having single-stranded adapter sequences or a dsDNA product containing 5′ modifications for downstream hybridization.

[0015] Additional aspects may include novel conjugated reporter probes (7) that may be coupled with a hybrid dsDNA probe. In certain aspects, a novel conjugated probe may include a GNP, or other single reporter conjugated with a ssDNA sequence or antibody or antibody fragment that may bind to the dsDNA probe. While still, further aspects of the invention may include novel target capture probes that may bind to and form an immobilized “sandwiched” complex aggregate comprising an embedded capture probe coupled with the hybrid dsDNA probe which is further coupled to a conjugated reporter probe (7), and preferably a GNP reporter probe. In this aspect, the localized immobilization may facilitate the generation of a visual signal, for example on a test strip, or even solution.

[0016] Additional aspects of the invention include systems, methods, and compositions for the quantification of early host-derived biomarkers of infection that may or may not be combined with quantified data directed to pathogen specific biomarkers, preferably generated by PCR, RT-PCR, or qRT-PCR. In one preferred aspect, RNA may be extracted from a biological sample provided by a potentially exposed or infected subject. The RNA may undergo qRT-PCT reaction to determine the levels of pathogen biomarkers, as well as host-derived biomarkers of infection, and preferably host-derived RNA biomarkers present in the subject's saliva. A plurality of biological samples may be taken from one or more subjects to generate a time-course of infection showing the relative levels of pathogen, and host-derived biomarkers over time. This data may be used to generate biomarker candidates for a lateral flow assay to detect pathogen specific host-derived biomarkers. This lateral flow assay may be administered to a subject in need thereof and provide an indication of infection, as well as the stage of infection by one or more specific pathogens. In one preferred aspect, the specific pathogen may include the SARS-CoV-2, commonly referred to as the COVID-19 coronavirus.

[0017] Additional aspects of the invention may include one or more of the preferred embodiments set forth in the claims.

[0018] Additional aspects of the invention may be evidenced from the specification, claims and figures provided below.

### BRIEF DESCRIPTION OF DRAWINGS

[0019] The novel aspects, features, and advantages of the present disclosure will be better understood from the following detailed descriptions taken in conjunction with the accompanying figures, all of which are given by way of illustration only, and are not limiting the presently disclosed embodiments, in which:

[0020] FIGS. 1A-B (A) show a general schematic diagram of a lateral flow assay in one embodiment of the invention thereof; (B) show another general overview of a lateral flow assay test strip in one embodiment of the invention thereof.

[0021] FIG. 2 shows a representative example of an infection course.

[0022] FIGS. 3A-B (A) shows an exemplary in vivo mouse experiment demonstrating the current state of the art for detection of pathogen infection. In this case, a group of mice may be infected with a pathogen and blood samples will be collected at the indicated days post infection. These samples will be used to carry out high throughput sequencing in order to characterize the presence of biomarkers and may also be used to carry out tests to compare the current invention with current state-of-the art detection methods. Below shows exemplary data showing the invention's ability to detect pathogen infection several days before other methods. All of the illustrated assays will be carried out during prior in vivo experiments. (B) Shows a timeline of a hypothetical viral infection and various tests designed to detect that infection.

[0023] FIGS. 4A-C shows an exemplary pathogen detection device in one embodiment thereof and in particular highlights the device's capability for multiplexing. The technology of the invention, and in particular a lateral flow assay test strip or test strip, is adaptable to multiple configurations depending on the aims of the end user. (A) As an initial screening test, the most important parameter is sensitivity to ensure no infected individuals are inadvertently labeled as “not sick” when they are in fact “sick.” A highly sensitive test identifies near 100% of the true positive cases of illness and has a near 0% false negative rate. Sensitivity of RNA transcript biomarker assay is tunable by addition of multiple test lines for different biomarkers, which if detected in combination increases the probability of identifying all true positives. (B) For clinicians assessing already symptomatic patients among diverse medical settings (e.g. emergency departments, primary care offices, assisted care facilities, field hospitals, etc.), it is important to distinguish between the general category of pathogen (i.e. viral vs. bacterial vs fungal) to begin the best early treatment prior to full identification of the causative agent. The inventive assay could inform treatment plans and dramatically reduce the use of antibiotics in cases of non-bacterial infections to help limit the spread of antibiotic resistant bacteria. (C) Early investigation of host signals in response to specific organisms may allow for an assay configuration in which infection by a specific pathogenic organism may be identified. The panel of microbes tested for could be specified by the end users' needs. For example, the military may be most interested in varieties of airborne and weaponizable pathogens while a domestic clinic needs to evaluate patients for seasonal flu, RSV, rhinovirus, and norovirus.

[0024] FIG. 5 shows the use of an exemplary pathogen detection device in one embodiment thereof. In this embodiment, the patient provides a saliva sample into a reaction cylinder, which may be represented here as a tube container preloaded with reaction reagents that may allow amplification reaction to proceed at room temperature to increase the biomarker concentration. Following this, the solution containing the amplified biomarkers may be applied to the lateral flow test strip. As fluid flows down the strip, a visible pink signal appears. In the simplest iteration of the strip, one band means a negative result and two bands equal a positive result indicating infection. In a consumer product embodiment, the strip will be contained in housing for ease of results interpretation.

[0025] FIGS. 6A-B (A) shows a Venn diagram indicating significant overlap in the identities of RNA transcripts expressed in saliva and PBMCs (peripheral blood mononucleated cells) according to sequencing data of healthy human samples. This overlap implies that transcripts present in the blood are also likely to appear in the saliva. Note, this transcript sequencing data was normalized to an average of 10 million reads coverage and does not describe abundance of these transcripts. (B) Representative PCC (Pattern Correlation Coefficient) Plot showing relative expression levels of RNA transcripts present in both saliva and PBMCs (two samples from the same individual). Every dot in this graph symbolizes a different transcript in the overlapping section of the Venn diagram in A. The average r value=0.64 (>0.5 is considered significant correlation). Overall, there are higher levels of expression of most transcripts in PBMCs vs. saliva, but also a subset of transcripts that are upregulated in saliva relative to PBMCs. Due to this data, the present inventors can pursue saliva as our sample type of choice from which to identify key signals of early infection.

[0026] FIG. 7 shows a general approach for identifying biomarkers of infection in one embodiment thereof.

[0027] FIG. 8 shows an example of a host RNA biomarker for infection, IFIT2 that was identified using in vitro transcriptomic datasets. Horizontally, the gene structure is shown with dark blue bar indicating the coding region of the gene. Vertically, the height of the peaks represents the relative abundance of the indicated RNA. For each study, the “−” lane indicates non-infected sample, while “+” lane indicates various types of viral infection. The changes in abundance for different studies were highlighted in different colors. Together, the identified RNA biomarker is upregulated across 9 different cell types and 10 different viral infections. The upregulation of this biomarker can be detected in vitro as early as 4 hours post infection which is well prior to any observable symptoms. Additional biomarkers may be identified and selected for use in the invention in a similar procedure as described generally above.

[0028] FIG. 9 shows qPCR of biomarker candidates in infected cells. Human lung cells (A549) were mock infected or infected with either influenza virus (left) or vesicular stomatitis virus (VSV, right) for 24 hours. RNA was collected and quantified using qPCR. Results are shown as ‘fold change over mock,’ and a dotted line indicates no change during infection. IFIT2 is an example of an RNA that is global marker of infection, as illustrated in FIG. 8. In this example, NEAT1 would distinguish VSV from influenza, and OAS1 would distinguish influenza from VSV.

[0029] FIG. 10 shows a schematic representation of optimization steps used to amplify and detect biomarkers from human saliva. Step 3.1, the RNA from 2 μL human saliva was successfully reverse transcribed into DNA and amplified using a customized RT-RPA kit. The reaction was achieved at constant 37° C. within 20 minutes. Step 3.2, upon successful detection of the potential biomarker for infection, multiple primer sets with different lengths and sequences were designed to optimize the biomarker amplification. The primer set that resulted in the highest amplification efficiency (reflected by the intensity of the band on the gel image) was chosen to be used in actual diagnosis. Step 3.3, the selected primers from previous step is modified to carry adapter sequences to allow downstream hybridization to lateral flow assay test strip and gold nanoparticle reporter probe. After RT-RPA amplification at 37° C. for 20 minutes, the resulting amplicon contains both adapter sequences and the sequences from the target biomarker. The final reaction product can then be directly applied to test strip for visualization.

[0030] FIGS. 11A-B demonstrates complementary DNA binding forms nucleic acid “sandwiches” that aggregate for visual readout. The amplified biomarker has a double-stranded DNA (dsDNA) region flanked by specific single-stranded overhanging adapters. The solution with this biomarker is mixed with a gold nanoparticle reporter, which itself is conjugated to a single stranded DNA adapter complementary to adapters of the amplified biomarker and the control capture probe on the nitrocellulose. Due to the mechanism of complementary DNA base pairing, as these overhanging DNA adapter strands interact in solution flowing through the membrane they will bind and form dsDNA structures with the ssDNA conjugated gold nanoparticles and stationary oligo capture probes forming nucleic acid “sandwiches” (FIG. 4A). As more and more of these reporter-amplified biomarker-capture probe sandwich structures form and aggregate, a visible pink signal appears on the nitrocellulose in the target detection zone (B), indicating the presence of that biomarker in the original sample. Here, the leftmost pink dot is representative of the complex illustrated in panel A, and the second pink dot is a control where the gold reporter alone is binding to its complimentary probe. This control verifies that the sample flowed correctly over the strip.

[0031] FIG. 12A-C shows colorimetric image of a series of test strips run with 10-fold dilutions of a synthetic RT-RPA product.

[0032] FIGS. 13A-D shows a lateral flow assay test strip having an external cover for ease of use in one embodiment thereof.

[0033] FIG. 14 shows a general schematic diagram of a lateral flow assay incorporating an antibody-based capture mechanism in one embodiment of the invention thereof.

[0034] FIGS. 15A-C shows a general flow diagram of an exemplary laboratory-based test and lateral flow test for detection of biomarkers.

[0035] FIG. 16 shows a flow-chart diagram for a designing and validating primers for biomarker candidates. The system being described in U.S. Provisional Application Nos. 62/934,873, and 63/006,561, incorporated herein by references with respect to the disclosure of FIG. 16.

[0036] FIG. 17: show host RNA biomarkers are gene transcripts deriving from the earliest immune responses of infected cells. The heatmap was generated from published RNA sequencing datasets and shows the level of expression change (color code at left) of certain RNA species upon infection of cultured human cells with different pathogens (top). In all cases, mock infected (−) and infected (+) cells are compared. Some of the SARS-CoV-2- and Influenza A-specific biomarkers are shown in the orange and green highlighted boxes.

[0037] FIGS. 18A-B shows various RNA biomarkers upregulated in response to diverse types of infections and are detectable in human saliva. (A) The heatmap was generated from published RNA sequencing datasets and shows the level of expression change (color code below) of certain RNA species upon infection of cultured human cells with different pathogens (top). (B) In all cases, mock infected (−) and infected (+) cells are compared. Here, we have saliva samples from 3 patients in the infectious disease unit. These represent acute infections with either a fungus (patient 1; Coccidioides), a virus (patient 2; Varicella-zoster virus), and a bacteria (patient 3; E. coli). Quantitative RT-PCR was carried out to measure the fold change of eight of our biomarker RNAs, relative to a healthy saliva control. Note the log scale on the Y-axis, indicating that these biomarkers are found at levels 10-10,000 times higher in the saliva of infected individuals compared to the saliva of healthy individuals. There are also saliva biomarkers that may be able to differentiate one type of infection from others, such as EGR1 which does not respond to fungal infection but is upregulated 100,000-fold in viral infection.

[0038] FIG. 19 shows host biomarker upregulation can be detected in a multiplexed RT-qPCR reaction. Human lung cells (A549) were either mock infected or infected with influenza virus and RNA was purified from cell lysates 24 hours after infection. RNA was then subjected to an RT-qPCR reaction using Taqman probes and chemistry. The biomarkers indicated on the X-axis were either measured in singleplex (black bars) or multiplex (orange bars) reactions using the primers and probes listed. Relative mRNA expression (Y-axis) was calculated by first using a host control gene to internally normalize samples, and then compared to the mock infected samples.

[0039] FIG. 20 shows some host biomarker upregulation precedes viral RNA detection. A human liver cell line (Huh7) was either mock infected or infected with the SARS-CoV-2 coronavirus. RNA was purified from cell lysates at 0, 2, 4, 8, 12, 24, and 48 hours post infection (X-axis). RNA was then subjected to RT-qPCR using the primers and probes listed. Relative mRNA expression (Y-axis) was calculated by first using a host control gene to internally normalize samples, and then compared to the mock infected samples. A full panel of biomarkers is shown on the left, whereas a subset of biomarkers are shown on the right that highlights biomarkers that are upregulated in the early-stage of infection (blue), late-stage of infection (green), and host control biomarkers that are no upregulated (gray). Detection of the SARS-CoV-2 nucleoprotein gene (N2) is also shown in red.

[0040] FIG. 21 show an exemplary lateral flow strip with antibody capturing scheme. Lateral flow strips were striped according to the schematic of FIG. 4 sMimic amplicons were generated in order to test the sensitivity of the lateral flow strip. The ‘excess’ line is capturing excess anti-FITC conjugated gold nanoparticles. The ‘control’ line is capturing mimic amplicons conjugated with FITC and Biotin. The ‘test’ line is capturing mimic amplicons conjugated with FITC and DIG.

[0041] FIG. 22 shows Table 3 which includes primers for detecting host biomarkers of infection. A subset of candidate biomarkers was chosen for primer optimization. Listed primer sets were used to carry out RT-qPCR to optimize primer efficiency, Ct values, melting curves, and log fold-change with respect to two host control biomarkers (RACK1 or CALR). Expression in untreated human lung cells (A549) was compared to either interferon treated A549 cells (A549+IFN) or influenza virus infected A549 cells (A549+flu).

[0042] FIG. 23 shows s Table which includes primers and probes for multiplexed detection of host biomarkers. A subset of candidate biomarkers from this Table was chosen based on their large fold-changes. Taqman probes were designed for each primer set to be compatible with Taqman fluorescent chemistry in an RT-qPCR reaction. Biomarkers were grouped into triplets based on Ct values in order to be compatible for multiplexing.

[0043] FIGS. 24A-B shows a Table which includes primers for amplifying host biomarkers using isothermal RT-RPA. A subset of candidate biomarkers was chosen for optimization of RT-RPA reactions (A). Those primer sets that satisfied conditions presented in FIG. 16 were then modified to contain 5′ modifications (FITC, Biotin, or DIG) for compatibility with the lateral flow assay of the invention (B).

[0044] FIGS. 25A-B shows amplified products from RT-RPA reactions can be detected on a lateral flow strip. (A) Lateral flow strips striped with secondary anti-rabbit antibody (gold nanoparticle excess line), streptavidin (control line) or anti-DIG antibody (biomarker line) were used to resolve the indicated RT-RPA reactions. Sample #1 only contains PBS and no RT-RPA reaction products, whereas all the other samples contain RT-RPA reaction (20-minute reaction) products. RT-RPA was carried out using purified RNA from influenza infected human lung cells (A549) as a template. (B) Lateral flow strips as described in panel A were used to confirm that primer sets on their own do does not produce a false positive signal. Indicated primer sets were mixed with PBS at the same concentration of an RT-RPA reaction and run out on the strips.

[0045] FIGS. 26A-C shows the kinetics of mRNA accumulation from biomarkers of infection. (A) A549 human lung cells were infected with Influenza A virus at multiplicity of infection (MOI) of 0.1 for 24 hours. Total RNA was harvested from the cells and 100 ng was used as template in a multiplex TaqMan assay. To demonstrate the dynamic range and the signal consistency, the raw Ct values are shown in the top panel, and the resulting fold changes are shown in the bottom panel. The error bar indicates the SEM from 2 biological replicates. (B) Huh7 human liver cells were infected with SARS-CoV-2 at MOI of 0.01 over a time course of 48 hours. Total RNA was harvested 0, 2, 4, 8, 12, 24, and 48 hours post infection. The fold changes of highlighted host mRNAs (top of each graph) were measured by RT-qPCR. Error bars represent the SEM of 3 biological replicates.

[0046] FIGS. 27A-C show abundance of mRNA in human saliva can determine whether individuals are infected with SARS-CoV-2 even in the absence of symptoms. (A) Heatmap summarizing mRNA levels from universal response genes in the saliva of SARS-CoV-2-positive individuals. Each infected sample, represented in columns, is compared to the average of 20 uninfected samples to calculate the relative fold change. The viral load in each saliva sample was measured using a separate RT-qPCR assay, and is reported above the heatmap. (B) Scatter plot correlating the fold change of two individual human mRNAs (top) to viral load. Each dot represents a SARS-CoV-2 infected individual. (C) Accuracy of universal response mRNA abundance in saliva to distinguish SARS-CoV-2-infected from uninfected individuals at different levels of viral loads. For each viral load cutoff, RT-qPCR delta Ct values from half of the SARS-CoV-2 positive samples above the cutoff along with half of the non-infected samples were used to train the logistic regression model, while the other half was used for evaluation. The process is bootstrapped for 100 times and the average ROC curve is plotted.

[0047] FIGS. 28A-B shows RPA (isothermal amplification) amplicons can be specifically detected on a lateral flow strip. (A) Agarose gel electrophoresis of RPA reactions carried out at 39° C. for 20 minutes (control biomarkers: RACK1 and NCL, infection biomarkers: IFI6, IRF9, and OAS2). Primers targeting the indicated control biomarkers were 5′ modified to contain FITC or biotin, while primers targeting the indicated infection biomarkers were 5′ modified to contain FITC or DIG. NTC=no template control, cDNA=reactions containing cDNA prepared from human cell line RNA. (B) Amplicons from panel A were diluted 1:50 in PBS and then run out on a lateral flow strip. Labeling to the right indicates the position of the excess gold capture strip (anti-rabbit mAb), control biomarker capture strip (streptavidin), and infection biomarker capture strip (anti-DIG mAb).

[0048] FIGS. 29A-D shows identification of universal response genes: 69 human genes are consistently upregulated in a broad range of infections performed in tissue culture. (A) Heatmap summarizing the observed abundance of mRNA transcripts from RNA-seq data. Each row represents transcripts corresponding to one of the 69 universal response genes. Each column represents the average expression across all mock (−) or infected (+) replicates combined from all studies on a given pathogen. (B) Number of commonly upregulated genes given any random combination of in vitro infection studies out of the 71 analyzed. From each study, we curated a list of significantly upregulated genes. We then compared these genes between randomly chosen groups of 2-10 studies (x axis). The X axis was truncated at 10 studies, because the analysis has become asymptotic at that point. (C) A characterization of the identified universal response genes via gene ontology enrichment analysis. The adjusted P value indicates the probability of observing the given number of genes in the specific gene ontology term by chance. Functions related specifically to anti-viral responses are the most enriched, and this could be due to an over representation of viral infection studies within the datasets analyzed in panel A, or because innate immunity to viruses is better studied and therefore the genes involved are better annotated. (D) Principal component analysis of gene expression data from the datasets analyzed in panel A. Mock (circles) vs. infected (triangles) samples are separated by the primary principal component (81.6% of data variance) x-axis.

[0049] FIGS. 30A-B shows the power of universal response mRNA abundance to identify infected human cells. Receiver operating characteristic (ROC) curves of various linear regression models established using the expression levels of the 69 universal response genes in the 71 in vitro datasets used. The area under curve (AUC) is summarized in each graph. (A) The performance of a model trained on 10% of the samples from the 71 in vitro datasets. The model was them used to classify the other 90% of the samples as mock-infected or infected. The grey lines indicate each replicate of cross validation, while the red curve summarizes the average ROC curve. The mean, minimum and maximum areas under curve (AUC) are indicated. (B) Cross validation analyses between different types of infections. In each case, the classifier was trained on infections of two types (top of graph) and used to predict whether human cells had been infected with the third type of pathogen based solely on the expression level of the 69 universal response genes.

[0050] FIG. 31 shows mRNA structure is preserved in human saliva samples. Sashimi plot indicating mRNA structure is preserved during the saliva sample processing and collection, so that the exon regions are preferentially sequenced over the introns. Shown here are saliva samples from 5 individuals, CXCL8 gene is selected as the example.

[0051] FIGS. 32A-D show the abundance of mRNA in human saliva can determine whether diverse infections are present in the body. (A) Heatmap showing relative expression of each of the universal response genes in saliva (rows), in transcripts per million (TPM) normalized to row z-score. Each column represents the saliva sample of one individual. (B) Volcano plot of all genes significantly upregulated in all eight infected patients compared to uninfected (DEseq2 Wald test, Fold change ≥2, Adjusted P-value ≤0.01), separated by their fold change in transcript abundance in saliva (infected vs. non-infected) and Benjamini-Hochberg adjusted p-values. The 69 universal-response genes are highlighted in dark red. (C) ROC curve representing the predictive power of the 69 universal response genes to distinguish healthy versus infected individuals. Grey lines indicate individual cross validations, the red line and shaded area indicate the average and variance from all 10 cross validations, respectively. (D) Total RNA from saliva of 3 clinically diagnosed/infected and 3 healthy individuals were used for RT-qPCR with primers recognizing mRNAs from the universal response genes at the bottom. To calculate the fold change within infected saliva samples, their Ct values were normalized to three control genes and then compared to the 3 non-infected saliva samples. Here, the fold change is calculated between the infected individual and each of the non-infected controls, whereas the error bar reflects the stand errors of means (SEM).

[0052] FIGS. 33A-C shows the kinetics of transcription from universal response genes. (A) A549 human lung cells were infected with Influenza A virus at multiplicity of infection (MOI) of 0.1 for 24 hours. Total RNA was harvested from the cells and 100 ng was used as template in the multiplex TaqMan assay described. To demonstrate the dynamic range and the signal consistency, the raw Ct values are shown in the top panel, and the resulting fold changes are shown in the bottom panel. The error bar indicates the SEM from 2 biological replicates. (B) Huh7 human liver cells were infected with SARS-CoV-2 at MOI of 0.01 over a time course of 48 hours. Total RNA was harvested 0, 2, 4, 8, 12, 24, and 48 hours post infection. The fold changes of highlighted host mRNAs (top of each graph; red data line) and of the SARS-CoV-2 genome (blue data line) were measured by RT-qPCR. Error bars represent the SEM of 3 biological replicates. (C) To determine the extent of mRNA variation from day to day in human saliva samples, 7 apparently healthy individuals (SS26-SS32) were asked to collect saliva on a daily basis over a period of 11 days. Total RNA was isolated from each sample and used as a template in the multiplex TaqMan assay described. Four of the universal response genes are shown. Error bars represent the SEM of 7 individuals. In all three panels (A-C), Ct value is converted to fold change by normalizing the Ct value to the Ct value of RPP30, and then normalized again to the abundance of mRNA measured in a mock infection or at Day 1 in panel C.

[0053] FIG. 34: show host RNA biomarkers are gene transcripts deriving from the earliest immune responses of infected cells. The heatmap was generated from published RNA sequencing datasets, and shows the level of expression change (color code at left) of certain RNA species upon infection of cultured human cells with different pathogens (top). In all cases, mock infected (−) and infected (+) cells are compared. Some of the SARS-CoV-2- and Influenza A-specific biomarkers are shown in the orange and green highlighted boxes.

[0054] FIG. 35 show the number of commonly upregulated genes given any random combination of in vitro infection studies. From each individual in vitro infection studies, we curated a list of significantly upregulated genes. We then compared genes that are commonly upregulated genes among randomly chosen groups of 2-10 studies (x axis), where the number of commonly upregulated genes are summarized in each dot, separated by the y-axis. The red box plot summarizes the distribution of the number of intersections among 70 random groupings given the group size (2-10).

[0055] FIG. 36 show cross validation of the linear regression classifier based on the universal response genes during viral, fungal, or bacterial in vitro infections. To assess whether the expression changes of the universal response genes are comparable among viral, bacterial, and fungal infections, we established linear regression classifiers using bacterial and fungal infection data and carried out classification on viral infection studies. We then repeat this step to classify fungal and bacterial infections. The ROC curves and the AUC are summarized in the graph.

[0056] FIG. 37 Detection of SARS-CoV-2 nucleic acids in human saliva using RT-qPCR. A total of 1,405 university-affiliated individuals were identified to carry SARS-CoV-2 using an RT-qPCR assay. In this assay, the primers targeted the viral N and E genes, and the template was human saliva. The distribution of the viral load within this population is plotted. The curve interpolating the log-normal distribution of viral load in the saliva of these 1,405 individuals was generated to represent the overall mean and variance of the distribution. The relative viral load in saliva (X axis) was quantified via a standard curve created using purified SARS-CoV-2 viruses (not shown).

[0057] FIG. 38 show the detection of dengue virus 3 (DENV3) nucleic acids in human saliva. In experimental infections of humans with dengue virus 3 (DENV3), blood and saliva samples were collected from enrollees at days 0, 1, 2, 3, 4, 6, 8, 10 post-infection. The relative viral load in both biospecimens was quantified using RT-qPCR with primers directed at the dengue genome/transcripts and the template being RNA purified from either blood or saliva. The Ct values resulting from RT-qPCR were converted into genomic copies/mL using a standard curve (not shown). The viral genome was detected 4 days or 6 days post initial exposure in blood and saliva, respectively.

[0058] FIG. 39 shows detection of the nucleic acids of other respiratory viruses in human saliva. Saliva from anonymous donors was collected on our university campus. The total RNA was harvested from saliva and was subjected to both human and bacterial ribosomal RNA depletion. The processed saliva RNA was sequenced at 30 million read depth on Illumina NovaSeq 6000 platform with 150-bp pair-end read configuration. The sequencing reads were first mapped to human GRCh38.p13 reference genome, and the unmapped reads were subject to metagenomic analysis using the Genomic Origin Through Taxonomic CHAllenge (GOTTCHA v1.0c) software package to identify the microorganism composition using both viral and bacterial non-redundant reference databases. For two of the saliva samples, the sequencing reads that mapped to viral reference database were summarized in the pie charts above, with their relative abundance indicated in percentages. The identified human pathogens (Human respiratory syncytial virus (RSV), and human coronavirus NL-63) are highlighted in red. This proves that the nucleic acids of both of these pathogens can be detected in human saliva.

### DETAILED DESCRIPTION OF INVENTION

[0059] The inventive technology may include systems, methods and compositions for the early detection of pathogens and/or infection in an asymptomatic subject through a novel lateral flow assay, which in a preferred embodiment may include a rapid self-administered test strip configured to detect one or more host RNA transcript biomarkers (coding or non-coding) produced by a subject's innate immune system in response to a pathogen or infection and present in saliva.

[0060] As generally shown in FIG. 1B, one embodiment the inventive technology may include systems, methods and compositions for the detection of early-infection in a subject which may include at least: a lateral flow assay test strip device (1) (also refer to as a test strip, or lateral flow strip), which may preferably include a fibrous or paper-based lateral flow strip (2) configured to allow liquid flow via capillary action; 2) a RT-RPA (reverse transcription recombinase polymerase amplification) reaction which may occur in a pre-prepared reaction cylinder (3), which may include a collective container configured to receive a fluid sample from a subject and pre-prepared to perform a RT-RPA reaction; and 3) one or more RNA biomarkers transcripts, also generally referred to as biomarkers, supplied in a fluid sample, which in a preferred embodiment may include a saliva sample provided by a subject.

[0061] Specific target RNA transcripts or biomarkers (9) produced by a patient's immune response (generally innate immune response or any other cellular pathway upregulated upon infection) and found in saliva may be indicative of early infection. As a result, in one embodiment of the inventive technology may include systems, methods and compositions for the detection of these target RNA transcripts, which may act as biomarkers for early-infection in a subject. However, as noted above, target RNA transcript biomarkers present in a typical fluid sample provided by, in this embodiment a human subject, are generally present at low concentrations and require amplification to be detected. To overcome this physical limitation, as further shown in FIG. 1B, in one embodiment of the invention, a subject may deposit a fluid sample, which in this case may comprise a saliva sample, into a reaction cylinder (3) where it may undergo an amplification step. Specifically, a reaction cylinder (3) may receive a fluid sample where it may undergo a RT-RPA reaction to amplify the RNA biomarker transcripts present in a fluid sample. In this preferred embodiment, a reaction cylinder (3) may be pre-loaded with a quantity of pre-prepared proteins, enzymes, salts, and other reagents that may allow for a RT-RPA reaction to proceed within the reaction cylinder. As shown in FIG. 1A, the reaction cylinder (3) may be pre-loaded with primers directed to target RNA biomarker transcripts that may further include C3 spacer elements. In another preferred embodiment, a reaction cylinder (3) may further be pre-loaded with one or more conjugated reporter probes (7), such as a conjugated gold nanoparticle (GNP) reporter probe.

[0062] In other embodiments, conjugated reporter probes (7), such as a conjugated gold nanoparticle (GNP) reporter probe may be pre-embedded, dried, lyophilized, or otherwise attached to the conjugate pad instead of being pre-loaded into the reaction cylinder. This specific embodiment may allow for the generation of a lateral flow assay test strip having multiple pre-embedded conjugate pads with different conjugated reporter probes (7).

[0063] Again, as shown in FIG. 1B, a fluid sample may be introduced into a reaction cylinder (3) manually by a subject, or through another automated, or semi-automated process, such that one or more RNA biomarker transcripts present in a fluid sample interact with the RT-RPA components, including the modified primers pre-loaded into the reaction cylinder (3) to facilitate a RT-RPA amplifying reaction. Importantly, in this preferred embodiment, the reaction cylinder (3) may be configured to generate the RT-RPA reaction isothermally.

[0064] In one embodiment, a reaction cylinder (3) may contain the necessary pre-prepared proteins, enzymes, salts, and other reagents necessary for a RT-RPA reaction to proceed isothermally at approximately room temperature (˜25° C.) or body temperature (˜37° C.) by holding in one's hand, eliminating the need for the laboratory equipment generally required to amplify nucleic acids. In one preferred embodiment, the RT-RPA reaction may proceed in the reaction cylinder (3) for a period of approximately 30 minutes or less.

[0065] As highlighted in FIG. 1A, the result of this isothermal RT-RPA reaction may include an engineered probe having a hybrid double stranded DNA (dsDNA) probe of a target biomarker sequence (GREEN (10)) coupled, in this case through a C-3 spacer, with overhanging single-stranded DNA (ssDNA) regions at its 3′ and 5′ ends. A first overhanging ssDNA region, in FIG. 1a at the 5′ end of the dsDNA probe, may include an annealing region (ORANGE (11)), while a second overhanging ssDNA region, shown here at the 5′ end of the dsDNA probe may include a target capture region (BLUE(12)).

[0066] Once the RT-RPA reaction is completed, the contents of the reaction cylinder (3) may be introduced to one or more conjugated reporter probes (7), which in a preferred embodiment may act as visual reporters by producing an observable indication of, for example the presence of a target RNA biomarker transcript in a sample. As shown above, a conjugated reporter probe may include a conjugated gold nanoparticle (GNP) (4) conjugated to single stranded DNA (ssDNA) molecule (5) complementary to both the annealing regions of the hybrid double stranded DNA molecules and a control capture probe (24) as discussed below. Naturally, the use of a GNP is exemplary only, as a variety of metalloid nanoparticle reporters of various geometries and sizes may be incorporated into the inventive technology. Additional embodiments may also include one or more non-metalloid reporter probes, such as fluorescence, enzymatic, or antibody reporters.

[0067] Again, referring to FIG. 1A, in the preferred embodiment highlighted above, this annealing region may be coupled with a GNP through a thiol, PEG₁₈ and PolyA construct. Notably, in this configuration, when a conjugated GNP reporter probes are concentrated in solution or in a small surface area, such as one or more discrete bands on the lateral flow test strip shown in FIG. 13, they may provide a visual signal, which in this embodiment may include a colored band, shown as a red band in FIGS. 1B and 13.

[0068] As further shown in FIG. 1B, the hybrid dsDNA probe (6) containing the target dsDNA transcript sequence with an annealing region and target capture region generated in the amplifying reaction in reaction cylinder (3) may be combined with a DNA-conjugated GNP reporter probe. In this embodiment, in the presence of an optimal running buffer, the complementary regions of the hybrid DNA molecule and DNA-conjugated GNP reporter probe may anneal forming an aggregated complex (13). As should be understood from the disclosure, such aggregate complexes may only form if the expected target sequence, in this case a biomarker indicative of early-infection, is both present in the sample and amplified via the RT-RPA reaction localized in the reaction cylinder.

[0069] Referring now to FIGS. 1A-B, in a preferred embodiment, the combined solution containing the aggregate complexes formed by the hybrid dsDNA probe (6) coupled with the DNA-conjugated GNP reporter probe may be introduced to the lateral flow strip. In a preferred embodiment, this combined solution may be introduced into a conjugate pad (14) region made preferably of glass fiber. The combined solution may flow via capillary action through a membrane, such as a nitrocellulose fiber membrane, towards an absorbent pad (16) region on the lateral flow strip (2) that may include a detection zone (17) having one or more capture probes embedded to the surface of the lateral flow strip, and preferably the surface of a nitrocellulose membrane (15) of a test strip. The position and orientation of the capture probes embedded in nitrocellulose membrane (15) of a test strip may be adjusted to optimize signal generation or sample-probe interactions. Notably, the absorbent pad (16) region may be positioned at the distal end of the lateral flow strip (2) to facilitate sample flow via capillary action through the detection zone.

[0070] As highlighted in FIG. 1A, a capture probe may include an immobilized streptavidin base tetramer (21) embedded in the nitrocellulose surface of a lateral flow strip. This immobilized streptavidin base may be coupled with a biotin-TEG linker (22) that may further be coupled with a ssDNA target capture probe (8) sequence that may be complementary to a target capture region on a hybrid dsDNA probe.

[0071] Again, in the preferred embodiment shown in FIG. 1A, the target capture region of a hybrid dsDNA probe (6) may anneal to a complementary capture probe ssDNA sequence (5) forming an immobilized “sandwiched” complex aggregate comprising an embedded capture probe coupled with the hybrid dsDNA probe (6) which is further coupled to the DNA-conjugated GNP reporter probe. As can be seen in FIGS. 1A-1B, where a biomarker of interest is present (i.e. a biomarker indicative of pathogen infection in a subject), the “sandwich” complex may be immobilized at a discrete position along the lateral flow strip. As noted above, the GNP reporter probes of the invention produce a red color signal in solution or when immobilized on the lateral flow strip. As such, when a certain concentration of complex aggregates is captured in close proximity to one another a visible signal within the detection zone (17) may be generated, which in this exemplary embodiment is shown as a red-pink band on the lateral flow strip. This visible signal within the detection zone (17) may indicate a positive result indicating the presence of a target pathogen, or an early-indication of infection in a subject. Notably, this process as generally described above may take less than 10 minutes and, in some instances, less than 3 minutes to run to completion and provide a discernable signal.

[0072] As further shown in FIG. 1A, any unbound GNP reporter probes not immobilized within the detection zone (17) may continue to flow through the lateral flow strip (2) towards a distal absorbent pad (16) and anneal to a control capture probe (24) immobilized to a control region on the surface of the lateral flow strip. In this manner, the unbound GNP reporter probes immobilized in the control region will also produce a visible signal providing a positive control for the system.

[0073] In an alternative embodiment, the invention may include a lateral flow assay strip having an antibody-based capture mechanism. Similar to the lateral flow assay described in FIG. 1A, the result of this isothermal RT-RPA reaction may include an amplified RPA product that may act as a control biomarker, and another amplified RPA product that may act as an infection biomarker. Once the RT-RPA reaction is completed, the contents of the reaction cylinder (3) may be introduced to one or more conjugated antibody reporter probes, which in a preferred embodiment may act as visual reporters by producing an observable indication of, for example the presence of a target RNA biomarker transcript in a sample. More specifically, as shown in FIG. 14, the isothermal RT-RPA reaction may generate at least two amplified RPA products, or amplicons, namely a control biomarker and infection biomarker respectively having modified 5′ ssDNA overhang regions forming a probe capture region and a target capture region respectively. In this embodiment, a control biomarker may include a dsDNA transcript region coupled with a 5′ FITC forward ssDNA oligo (GREEN) and 5′ biotin reverse ssDNA oligo (ORANGE). The infection biomarker of this embodiment may include a dsDNA transcript region coupled with a 5′ FITC forward ssDNA oligo (GREEN and PINK) and a 5′ DIG ssDNA reverse oligo (BLUE).

[0074] As further shown in FIG. 14, GNP may be conjugated with an anti-FITC (fluorescein isothiocyanate) antibody, and preferably an anti-FITC antibody (19) produced in a rabbit. As also shown in FIG. 14, streptavidin may also be stripped onto the membrane (15) as generally described above to capture control biomarker amplicons present in the amplified RPA product. In this embodiment, an anti-DIG (Digoxigenin) antibody (20), and preferably an anti-DIG antibody raised in mouse, may also be stripped onto the lateral flow membrane (15) to capture infection biomarker amplicons present in the amplified RPA product.

[0075] As further shown in FIG. 14, the hybrid dsDNA control and infection amplicon probes generated in the amplifying reaction may be combined with an anti-FITC antibody-conjugated GNP reporter probe. In this embodiment, the anti-FITC antibody may bind to the 5′ FITC-forward oligo of the control and infection biomarker forming an aggregated complex (13). In this embodiment, the aggregated complexes (13) may further be introduced to the lateral flow strip (2) of the invention. In a preferred embodiment, this combined solution may be introduced into a conjugate pad (14) region made preferably of glass fiber. The combined solution may flow via capillary action through a membrane, such as a nitrocellulose fiber membrane, towards an absorbent pad (16) region on the lateral flow strip (2) that may include a detection zone (17) having one or more capture probes embedded to the surface of the lateral flow strip, and preferably the surface of a nitrocellulose membrane (15) of a test strip. The position and orientation of the capture probes embedded in nitrocellulose membrane (15) of a test strip may be adjusted to optimize signal generation or sample-probe interactions. Notably, the absorbent pad region may be positioned at the distal end of the lateral flow strip (2) to facilitate sample flow via capillary action through the detection zone.

[0076] As noted above, a capture probe may include an immobilized streptavidin base tetramer (21) embedded in the nitrocellulose surface of a lateral flow strip. This immobilized streptavidin base may be coupled with a biotin-TEG linker (22) that may further be coupled with a ssDNA target capture probe sequence that may be complementary to a target capture region on a hybrid dsDNA probe, and preferably the 5′ biotin-reverse oligo. Further, a capture probe may include an immobilized anti-DIG antibody that may be configured to bind to the 5′ DIG-reverse oligo. In this configuration, control and infection biomarker amplicons may be bound to their respective locations by their respective capture probes. As noted above, the GNP reporter probes of the invention produce a red color signal in solution or when immobilized on the lateral flow strip. As such, when a certain concentration of complex aggregates are captured in close proximity to one another a visible signal within the detection zone (17) may be generated. This visible signal within the detection zone (17) may indicate a positive result indicating the presence of a target pathogen, or an early-indication of infection in a subject. Notably, this process as generally described above may take less than 10 minutes and, in some instances, less than 3 minutes to run to completion and provide a discernable signal.

[0077] As further shown in FIG. 1A, any unbound GNP reporter probes not immobilized within the detection zone may continue to flow through the lateral flow strip (2) towards a distal absorbent pad and anneal to an anti-rabbit control capture probe (23) immobilized to a control region on the surface of the lateral flow strip, being configured to capture unbound antibody-conjugated GNP reporter probe. In this manner, the unbound GNP reporter probes immobilized in the control region may also produce a visible signal providing a positive control for the system.

[0078] Naturally, the system may be adapted for a variety of practical applications. For example, the system may be modified to detect a plurality of biomarkers RNA transcripts corresponding with a plurality of distinct capture probes at a plurality of detection zones on a lateral flow strip. Moreover, it should be noted that such probes and their design are exemplary only, as a variety of different probe configurations, as well as probe-generated signals may be interchangeable within the system as generally described herein.

[0079] For example, as shown in FIG. 4, in one embodiment, the above described lateral flow detection system may be used to detect, with varying degrees of sensitivity, infection of a subject by a known or unknown pathogen. In other embodiments, the above described lateral flow detection system may be used to determine pathogen type, such as bacteria, virus or fungal. In additional embodiments, the above described lateral flow detection system may be used to determine specific pathogens or their serotypes.

[0080] In one embodiment the inventive technology may include novel systems, methods, and composition for the detection of pathogen specific infection in a subject in need thereof. In one preferred embodiment, the inventive technology may provide for the detection of infection of a specific pathogen in a human subject. In this preferred embodiment, a biological sample, which may preferably include a saliva sample, may be provided by a subject which may contain one or more biomarkers for infection with a specific pathogen. In this embodiment, a saliva sample, may be further processed, for example by an on-site, or off-site clinical laboratory wherein RNA molecules present in the saliva sample are extracted for further testing. The extracted RNA is then undergoing a qRT-PCR process where the biomarkers of the pathogen. In the embodiment, one or more of the primer sequencers known to be directed to a components of a target pathogen may be used to identify specific biomarkers produced by the target pathogen. In this embodiment, the subject may provide a plurality of biological samples for RNA extraction and qRT-PCT processing so as to generate a time-course of pathogen biomarkers. These plurality of samples may provide a quantified baseline progression of target pathogen biomarkers from an initial point of exposure to the pathogen in a subject. As can be appreciated from the foregoing, such processes may be implemented for multiple target pathogens, and may further be conducted in series using multiple subjects to generate a library of time-course biomarkers of target pathogens.

[0081] As noted above the inventive technology may allow the detection of host-derived biomarkers that may be present in a subject's biological sample before the virus can be detected and well before any symptoms of infection may occur. In one preferred embodiment, RNA may be extracted from the biological sample, which in this case is a saliva sample containing host derived biomarkers of infection and further subject to qRT-PCR. In this embodiment, the subject may provide a plurality of biological samples for RNA extraction and qRT-PCT processing so as to generate a time-course of host-derived biomarkers. Again, multiple samples may provide a quantified baseline progression of host-derived biomarkers, such as RNA biomarkers generated by the hosts innate-immune response in response to the target pathogen from an initial point of exposure to the pathogen and through the incubation period. Again, as can be appreciated from the foregoing, such processes may be implemented for multiple target pathogens, and may further be conducted in series using multiple subjects to generate a library of time-course host-derived biomarkers, and preferably host-derived RNA biomarkers produced in response to a target pathogen. By combining RNA markers from both the host innate-immune response occurring during the incubation period, and from the target pathogen itself, the invention may expand the detection window for infection by various pathogens.

[0082] In one preferred embodiment, the inventive technology may provide for the detection of infection of the novel coronavirus SARS-CoV-2 (COVID-19) in a human subject, and in particular host-derived biomarkers of infection generated in response to infection of the novel coronavirus SARS-CoV-2 (COVID-19) in a human subject. As noted above, this example is merely exemplary of a number of different pathogens that may be incorporated in places of the COVID-19 coronavirus. As shown in FIG. 15, in this preferred embodiment, a biological sample, which may preferably include a saliva sample, may be provided by a subject which may contain one or more biomarkers for COVID-19 infection. In this embodiment, a saliva sample, may be further processed, for example by an on-site, or off-site clinical laboratory wherein RNA molecules present in the saliva sample are extracted for further testing. The extracted RNA is then undergoing a qRT-PCR process where the biomarkers of the pathogen, in this case the COVID-19 coronavirus are identified. In the embodiment, one or more of the primer sequencers identified in Table 2 (SEQ ID NO. 469-480) below may be used to identify specific biomarkers produced by the COVID-19 coronavirus. In this embodiment, the subject may provide a plurality of biological samples for RNA extraction and qRT-PCT processing so as to generate a time-course of pathogen biomarkers. For example, as shown in FIG. 15B, multiple samples may provide a quantified baseline progression of pathogen biomarkers from an initial point of exposure to the pathogen.

[0083] As noted above the inventive technology may allow the detection of host-derived biomarkers that may be present in a subject's biological sample the virus can be detected before any symptoms of infection may occur. In one preferred embodiment, RNA may be extracted from the biological sample, which in this case is a saliva sample containing host derived biomarkers of infection and further subject to qRT-PCR. In this embodiment, the subject may provide a plurality of biological samples for RNA extraction and qRT-PCT processing so as to generate a time-course of host-derived biomarkers. For example, as shown in FIG. 15B, multiple samples may provide a quantified baseline progression of host-derived biomarkers, such as RNA biomarkers generated by the hosts innate-immune response in response to the COVID-19 pathogen from an initial point of exposure to the pathogen and through the incubation period. Again, as shown in FIG. 15, by combining RNA markers from both the host innate-immune response occurring during the incubation period, and from the COVID-19 coronavirus itself, the invention may expand the detection window for COVID-19 coronavirus infection.

[0084] Referring now to FIG. 15C, in another embodiment, a lateral flow assay strip may be configured to detect one or more host-derived biomarkers of COVID-19 infection, and preferably host-derived RNA biomarkers of COVID-19 infection, as well as biomarkers of COVID-19 infection. As noted in the FIG. 15C, the lateral flow assay strip may be configured to include a plurality host-derived RNA biomarkers of COVID-19 infection positioned sequentially according to their prevalence during the time-course of infection established by qRT-PCR described above. In this manner, the lateral flow assay strip of the invention may be able to not only identify a subject that has been exposed to a pathogen, such as the COVID-19 coronavirus, but may include sequential detection lines embedded with one or more biomarkers that correspond to a selected time-course of infection. In this preferred embodiment, a subject may provide a biological sample, and preferably a saliva sample. The saliva sample is allowed to undergo an amplification reaction to increase the quantity of biomarkers and then applied to the lateral flow assay strip as generally described above. In this embodiment, the host-derived RNA biomarkers of COVID-19 infection may be immobilized by target capture probes forming an immobilized aggregate complex which may in turn produce a visible single, again, as generally described above.

[0085] Notably, in this embodiment, COVID-19 biomarkers may also be immobilized by target capture probes forming an immobilized aggregate complex which may in turn produce a visible single separate from the host-derived RNA biomarker visual signal. In this manner, a subject, or health care worker may be able to quickly identify: 1) if the subject has been exposed to, in this case the COVID-19 coronavirus; 2) if the subject is infected with the COVID-19 coronavirus but is still in the incubation period of the virus's infection cycle; 3) the approximate time since exposure the COVID-19 coronavirus; 4) the approximate time that the infection with the COVID-19 coronavirus biomarkers may be contagious. As can further be appreciated, in additional embodiment, the lateral flow assay strip may further be configured to identify pre-symptomatic subjects, as well as asymptomatic subjects. Most importantly, the results of the lateral flow assay may allow early identification of infection and facilitate proper quarantine and contact tracing protocols.

[0086] The invention now being generally described will be more readily understood by reference to the following examples, which are included merely for the purposes of illustration of certain aspects of the embodiments of the present invention. The examples are not intended to limit the invention, as one of skill in the art would recognize from the above teachings and the following examples that other techniques and methods can satisfy the claims and can be employed without departing from the scope of the claimed invention. Indeed, while this invention has been particularly shown and described with references to preferred embodiments thereof, it will be understood by those skilled in the art that various changes in form and details may be made therein without departing from the scope of the invention encompassed by the appended claims.

### EXAMPLES

### Example 1: Identification of Target Biomarkers of Infection

[0087] In one embodiment the invention may include systems, methods and compositions for the identification and use of one or more RNA transcript biomarkers. As shown in FIG. 7, in one preferred embodiment, a first tissue culture experiment (left) can be established and tested to identify target RNA transcripts that may be upregulated during an experimental infection, and that may also be secreted from target cells. RNAs that are upregulated may be used as candidate biomarkers and engineered for compatibility with the lateral flow system as generally described above. In parallel, RNAs from healthy and infected human saliva may be characterized in a clinical trial (right) in order to identify RNA biomarkers of infection in humans. Those biomarkers, if not already identified in the tissue culture experiments, will for compatibility with the lateral flow system as generally describe above.

### Example 2: Identification of Early Host Biomarkers

[0088] As generally shown in FIG. 8, one embodiment of the invention includes the identification of early host biomarkers for infection using a bioinformatic meta-analysis. In order to identify host nucleic acid biomarkers produced in response to infection at an early stage, the present inventors searched publicly available transcriptomic datasets. The selected datasets were directed to those generated using various human tissue types that are infected by different viruses at multiple time points. The present inventors analyzed these datasets using a standardized bioinformatic pipeline and identified human coding and non-coding RNA that are upregulated in response to infection. These data summarized the host RNA transcripts that are commonly upregulated across different studies. This list of commonly upregulated RNA transcripts was comprised of exemplary candidate RNA transcript biomarkers. The upregulation of these RNA transcripts signals an ongoing infection (Example in FIG. 1).

[0089] Concurrently, the present inventors also collected and sequenced RNA purified from saliva samples of healthy and clinical human participant. Through bioinformatic data analysis, the RNA transcripts that are significantly different between healthy participants and infected patients were identified and cataloged. These clinical datasets may then be used to filter out the potential biomarkers. Altogether, the final list of host RNA biomarkers may have the potential to differentiate healthy individuals from subjects that are infected by various pathogens (viruses, bacteria, fungi and protists), using saliva as the non-invasive diagnostic material.

### Example 3: Validation of Target Biomarkers

[0090] As generally shown in FIG. 9, one embodiment of the invention includes the validation of target biomarkers using quantitative polymerase chain reaction (PCR) protocols. As biomarkers identified using the methods outlined above may be further confirmed in tissue culture infection experiments. Reverse Transcription quantitative PCR (RT-qPCR) of RNA allows specific quantification of the upregulation of candidate biomarkers as a ‘fold change’ in infected cells compared to uninfected cells. Such information helps when evaluating detection sensitivity of the lateral flow assay stick with respect to a given biomarker.

[0091] While only six exemplary biomarker candidates are being shown here, such list should not be construed as limiting on the number of biomarkers that may be used with the current invention. Indeed, there may be numerous biomarker candidates that may be incorporated into the invention as described herein.

### Example 4: Isothermal Amplification of Infection Biomarkers from a Bodily Fluid Sample

[0092] Upon successful validation of RNA biomarkers that are upregulated during infection in vitro, the target RNA biomarker may be subjected to one or more optimization processes to ensure successful isothermal amplification of the biomarker from human saliva and visualization on a lateral flow assay stick.

[0093] As generally shown in FIG. 10, the presence of a target RNA transcript biomarker in a bodily fluid sample, which in a preferred embodiment may include saliva, is confirmed using an isothermal, one-step reverse transcription and recombinase polymerase amplification (RT-RPA, Piepenburg et al., PLoS Biology 2006) (FIG. 10 Step 3.1). The RT-RPA may be customized by combining TwistDX TwistAmp Basic RPA kit with additional RNase inhibitor, reverse transcriptase and oligo dT primers. The use of this customized reagent allows one-step conversion from target RNA to DNA, which can then be amplified to enhance signal at 37° Celsius (approximate body temperature) within 10-20 minutes.

[0094] As further shown in FIG. 3 Step 3.1, the amplicon may be separated on 2% agarose gel and visualized by ethidium bromide staining. Comparing to the positive control, the RT-RPA amplified the target RNA biomarker using as low as 2 μL human saliva as input, without additional purification. To achieve efficient amplification and detection, multiple primer sets were designed to amplify the target biomarker (FIG. 10 Step 3.2). These primer sets vary in length and sequence. While keeping other parameters constant, the efficiency for each primer set to amplify the target RNA is compared based on the intensity of amplicon visualized on 2% agarose gel. In the example shown in FIG. 10, while all primer sets where able to amplify the target biomarker, primer set #3 resulted the highest amplification efficiency. Thus, primer set #3 is further integrated into the downstream processes. Finally, based on the test result from Step 3.2, the optimal primer sequences were concatenated with customized adapter sequences on 3′ and 5′ ends that may be complimentary to probe sequences on a gold nanoparticle-based probe and a target capture probe (8) embedded in the test strip, respectively (FIG. 3 Step 3.3). The primers with adapters were then used to amplify the biomarker RNA.

[0095] To ensure the adapter sequence remain single-stranded after RPA amplification, the present inventor introduced a tri-carbon chain spacer (C3) within the primer sequence to prevent DNA polymerase from generating the complementary strand of the adapter sequences. As the result, the end product may include an amplified hybrid DNA probe having with a target dsDNA transcript region, while maintaining the single-stranded adapter sequences for downstream hybridization.

### Example 5: Visualization of Amplified Product Using Lateral Flow Assay Stick

[0096] As shown in FIG. 11, the primary unit of the detection assay is a membrane, which is the substrate through which the solution containing the amplified biomarker(s) and the reporter flow. In one preferred embodiment, a membrane (15) may include one or more embedded capture probes (8) that are able to bind complementary probes in the solution that flows through the membrane. As the capture probes bind their respective amplified biomarker or the reporter, a signal appears that indicates infection or no infection. Multiple variables within this broad description of this assay are tunable to be able to express different types of results.

[0097] Colorimetric image of a series of test strips run with 10-fold dilutions of a synthetic RT-RPA product are shown in FIG. 12. In this example, a sample contains 2 μL amplified biomarker(s), 10 μL gold reporter, and 8 μL running buffer is applied to the conjugate pad (14) of the test strip (2). (Concentrations of RT-RPA product are listed along with the visual readout.) The solution flows through the nitrocellulose membrane towards the absorbent pad via capillary action. Samples with amplified biomarkers above the limit of detection will aggregate at the first circle in the detection zone. Excess gold reporter that does not interact with amplified biomarkers, either because they were not present in the initial sample or their concentration is below the limit of detection, will continue to flow down the strip and aggregate at the control zone (18).

[0098] In the example of the strips shown in (A), a negative result will show one circle on the right side and a positive result will show two circles present (even if faint intensity). To enhance intensity of visual signal, additional 10 μL gold reporter and 8 μL running buffer were combined and applied again to the conjugate pad. (B) Is a color image of the same strips as in (A) shown for comparison. (C) The assay can be assembled to multiplex using different capture probes on the test strip and different adapter primers in the RT-RPA reaction.

### Example 6: Materials and Methods (1)

[0099] As shown in the Figures generally, in one embodiment, a lateral flow assay test strip or test strip may be formed of a nitrocellulose membrane which may be a GE Whatman backed nitrocellulose membrane FF120 HP; 5 cm×0.4 cm. A glass fiber conjugate pad may include a Millipore G041 “SureWick” GFCP103000, 1 cm×0.4 cm. A cellulose absorbent pad may include a Millipore C083 “SureWick” cellulose fiber sample pad strips CFSP173000, 1 cm×0.75 cm.

[0100] As shown in the figures and described generally above, a conjugated GNP probe may include a biotinylated oligo capture probe bound to streptavidin, which may then be embedded on a nitrocellulose membrane. In one example, 600 μM oligo capture probes were incubated with 200 μM streptavidin for 1 hour at room temperature. With the capture probes now in a complex with streptavidin they may be diluted to a different concentration to optimize binding conditions and signal intensity. In a preferred example, 0.5 μL of solution containing this capture probe-streptavidin complex are pipetted onto nitrocellulose membrane (15) in appropriate orientation, with target probe placed nearest the conjugate pad and control probe placed nearest the absorbent pad. As noted above, a conjugated GNP probe or reporter may be coupled with one or more single-stranded DNA sequences via salt aging method −60 nm or 15 nm or 12.5 nm diameter A running buffer may be mixed with RT-RPA amplified solution product and conjugated gold nanoparticle just prior to running on test strip.

### Example 7: Identification of 69 Human Universal Response Genes

[0101] To determine human genes that are commonly upregulated in diverse pathogenic infections, the present inventors first carried out a meta-analysis of publicly available data. We obtained a total of 71 relevant datasets, all profiling in vitro transcriptional responses of cultured human cells infected with a variety of pathogens (28 viral, 7 bacterial and 3 fungal pathogens, with many pathogens represented by more than one dataset; Table 3). Each study includes paired transcript sequencing for infected and mock-infected human cells, usually in multiple replicates. For each dataset, raw RNA sequencing reads were retrieved from the NCBI short-read archive and analyzed as described herein. Despite the many variables in these datasets (pathogens, human cell lines, labs conducting the studies), the present inventors obtained a list of 69 genes that are consistently upregulated in infected cells across the array of pathogen types tested (FIG. 29A and genes are listed in Table 4). We refer to these as “universal response” genes. Importantly, the number of universal response genes reaches an asymptote of 69 genes as more and more studies were added to the analysis (plotted up to 10 studies in FIG. 29B). After reaching 69 genes, the addition of more datasets did not change the constitution of this group of 69; new genes were no longer added or subtracted from the set as datasets accumulated. Therefore, while some aspects of the transcriptional response to infection are specific to certain classes of pathogens, these 69 genes represent a core universal response to infection.

[0102] Consistent with our understanding of innate immunity, universal response genes mainly belong to pathways related to cellular antiviral functions and type-I interferon responses (FIG. 29C). We then carried out principal component analysis of all the datasets used using the expression profiles of these 69 genes (FIG. 29D). Of the many variables involved, the main contributor to the data variance (PC1; which explains 81.6% of the variance) separates these in vitro experiments by conditions of infected (triangles) or uninfected (circles). This suggested that levels of mRNAs from this group of 69 genes can differentiate infected from uninfected human cells.

[0103] We the present inventors assessed whether the abundance of these mRNAs in blinded human tissue culture samples could predict whether they had been infected or not. Using the 387 samples (meaning, independent experimental replicates) represented in the 71 in vitro infection datasets, we carried out cross-validation using a linear regression model. Specifically, we first established the linear regression classifier using the expression data of the 69 genes in 10% of the samples, randomly selected. Next, we evaluated the predictive power of this model to classify the remaining 90% of the samples as infected or not. This cross validation was repeated 10 times, and the accuracy of classification is summarized via receiver operating characteristic (ROC) curve (FIG. 30A). Overall, the cross validation resulted in a mean area under the curve (AUC) of 0.94, also interpreted as a 94% chance of distinguishing mock from infected conditions. The worst outcome of the 10 repeats had an AUC of 0.89, and the best an AUC of 0.96.

[0104] We then performed additional cross validation analyses among different types of infections (FIG. 30B). We trained the classifier using only viral and bacterial samples and then classified the fungal samples as infected or not. This was highly successful and yielded a ROC cure with an AUC of 1.0. We then trained the classifier using only viral and fungal samples and then classified the bacterial samples as infected or not (again, AUC of 1.0). Finally, we trained the classifier using a combination of bacterial and fungal samples, and this model classified the viral samples as infected or not with AUC of 0.96. Collectively, this indicates the upregulation of these universal response in human cell lines can correctly identify infection status, independent of the cell and pathogen types involved, and that these 69 genes truly represent a universal response to infection.

### Example 8: Host Immune Signatures are Consistently Upregulated in Infected Human Saliva

[0105] The present inventors next evaluated the abundance of mRNAs from these 69 genes could classify humans as infected or not. We obtained saliva samples from 15 healthy individuals and from 8 infected individuals. Of the latter, six saliva samples are from patients in our infectious disease clinic (Table 5). Three had been diagnosed with SARS-CoV-2 (enrollees SS19-SS21), one with Vibrio cholera (SS16), one with Staphylococcus aureus (SS17), and one with varicella-zoster virus (VZV; SS18). Two additional saliva samples were included from apparently healthy individuals from whose saliva we were able to map reads to pathogen genomes (SS22, CoV-NL63 seasonal coronavirus; SS23, respiratory syncytial virus (RSV)) (see Methods). Collectively, these eight enrollees represent six respiratory tract infections caused by RNA viruses, one infection caused by a DNA virus (VZV), and two bacterial infections. Total RNA was prepared from each of these 23 human saliva samples, followed by depletion of bacterial and human ribosomal RNA. RNA with high integrity can be readily isolated from saliva (FIG. 31). Libraries were sequenced with high-throughput short-read sequencing.

[0106] Consistent with the in vitro meta-analysis, 66 out of the 69 human universal response gene transcripts were significantly enriched in the saliva of all 8 infected individuals compared to healthy individuals (FIG. 32A). This confirms that mRNAs identified as being significantly upregulated in a diverse panel of in vitro tissue culture infections are also upregulated in saliva of infected individuals. In total, there were 544 genes that were significantly upregulated across all the infected individuals (light pink dots in FIG. 32B, adjusted P-value≤0.01, Fold Change≥2; Table S4). Of these, the universal response genes are shown as dark red dots and are not necessarily the most highly up-regulated transcripts. We next carried out cross validation and found that a classifier trained on the mRNA levels of universal response genes in the 71 in vitro datasets analyzed above can correctly classify our human saliva samples as having come from someone who is infected or healthy, just from the abundances of these mRNAs in their saliva (FIG. 32C, Mean AUC=0.86). Thus, this classification was made correctly 86% of the time.

[0107] The present inventors next verified this finding with RT-qPCR and were able to include two additional patient samples for this analysis. The new saliva samples come from an enrollee being treated for a Coccidioides fungal infection (SS24, Table 5) and another enrollee being treated for Escherichia coli bacterial infection (SS25, Table 5). We amplified mRNA from six of the universal response genes (CXCL8, EGR1, ICAM1, IFIH1, IFIT2, RDAS2) from the saliva from these additional enrollees, and from SS18 (Table 5), a patient being treated for VZV (viral) infection. We observed from 10- to 10⁵-fold upregulation of most of the host mRNAs within the saliva of infected individuals compared to healthy ones (FIG. 32D). Importantly, the infected individuals analyzed thus far have carried pathogens known to have different primary replication sites, including respiratory tract (RSV, CoV-NL63, SARS-CoV-2, and Coccidioides), digestive tract (V. cholerae and E. coli), and pulmonary tract (S. aureus), yet these signatures are reliably detectable in saliva.

### Example 9: Development of a Multiplex TaqMan RT-qPCR Assay to Monitor mRNAs Derived from Universal Response Genes

[0108] To measure the transcription levels of the universal response genes more efficiently and quantitatively, we moved away from total RNA sequencing and developed a multiplex TaqMan RT-qPCR assay that measures the level of mRNA produced from 15 of the 69 universal response genes. Together with 3 internal controls genes (RPP30, RACK1, and CALR), the levels of all 18 genes are measured in a total of 6 multiplexed reactions. We optimized this TaqMan assay on RNA harvested from A549 human lung cells mock infected, or infected with influenza A virus (H3N2/Udorn) at MOI of 0.1 for 24 hours. Using these samples, we confirmed that the assay can measure each mRNA over a large dynamic range (Ct 15-40) with small amount of input RNA (≥100 ng) (FIG. 33A). At this high MOI but relatively short infection timepoint, already 14 out of the 15 measured genes are upregulated. The range of mRNA upregulation in infected cells ranged from 2.6-fold (CXCL8) to 6.1×10⁵-fold (OAS2). Because this experiment measured the abundance of host mRNAs at a single timepoint of a synchronized infection, we next infected Huh7 human liver cells with SARS-CoV-2 and collected cells on a time course. The kinetics of expression of six of the universal response transcripts is shown in FIG. 33B. Some universal response genes (CXCL8, MX1, and IRF9) are upregulated in the early time points of the infection but are then rapidly downregulated within the first 24 hours, whereas the upregulation of other genes (such as the classical type-I interferon inducible genes, IFIT2, IFITM2, and IFIH1), tracks with viral genome replication. This result suggests that the abundance of mRNA from any particular gene will depend on the timepoint during infection, at least in a synchronized infection taking place in a tissue culture dish.

[0109] The present inventors next sought to determine if the mRNA levels of universal response genes also vary over time in human saliva. We enrolled 7 apparently healthy individuals who were asked to collect saliva samples daily over a period of 11 days (FIGS. 33C, 34). When RNA from these saliva samples was analyzed with the multiplex TaqMan assay (Methods), the expression level of the universal response genes remained relatively stable overtime. When compared to day 1, transcript abundance in saliva changed no more than 5-fold in subsequent days. Together, the multiplex TaqMan RT-qPCR assay described herein can be used to reliably determine the relative abundance of these universal response gene transcripts from in vitro infections and human saliva samples alike. An interesting but unresolved issue requiring longitudinal studies is how the expression of these universal response mRNAs would change over time during a human infection.

### Example 10: Universal Response Transcripts in Saliva can Detect Infection in Asymptomatic SARS-CoV-2 Carriers

[0110] The present inventors next sought to determine if universal response mRNAs in saliva can identify infection, even in individuals with no symptoms. During the 2020-21 academic year, the University of Colorado Boulder carried out weekly SARS-CoV-2 screening for students and staff. The screening effort enabled us to enroll university affiliates into an associated human study. All saliva samples were screened for SARS-CoV-2 by a RT-qPCR test. Enrollees were asked to confirm the absence of any symptoms at the time of saliva donation. We examined the levels of mRNA from universal response genes in the saliva of 48 SARS-CoV-2 positive saliva and 20 non-infected individuals (FIG. 27A). We observed higher levels of universal response mRNAs in the saliva of most of the SARS-CoV-2 positive individuals. Importantly, we noticed strong correlation between the level of mRNA observed and saliva viral load. Within saliva samples that carried significant viral load, almost all had elevated level of mRNAs deriving from universal response genes.

[0111] The correlation between viral loads and the expression of the universal response genes is highlighted by further analysis. Specifically, for two of the universal response genes (IFIT3 and IFI27), we plotted the relative fold change of mRNA in saliva against the number of viral genome copies in saliva (FIG. 27B). For SARS-CoV-2, infectious virions are almost never recovered from individuals with a viral copies measurement less than 10⁶ copies per mL. Individuals with lower viral copies/mL are either on the rapid progression to high virus titers at the beginning of infection, or on the long slow tail of recovery after infection. Interestingly, the mRNAs of IFIT3 and IFI27 accumulate in saliva very near this point, at the transition of viral titers to above 10⁴-10⁶ viral copies/mL. This is consistent with a model where mRNAs from universal response genes accumulate in saliva specifically during periods of acute viral replication.

[0112] To evaluate the accuracy of using universal response mRNA abundance in saliva to distinguish infected from non-infected humans, we carried out cross-validation using linear regression models established on half of the data from our human studies (N=34). This classifier was then used to classify all remaining human saliva samples as infected or not (N=34, FIG. 27C). Overall, this analysis resulted in an area under curve (AUC) of 0.92 and 0.97 for classifying infection status for individuals with viral load greater than 10⁴ genomic copies/mL and 10⁵ genomic copies/mL, respectively. The evaluation again supports that the abundances of mRNAs from universal response genes, detectable in saliva, are highly reliable in predicting whether or not an individual is infected. This is especially true for individuals harboring viral loads consistent with the infectious phase of disease. Importantly, none of these individuals reported symptoms at the time of their saliva being collected, suggesting that the mRNAs in saliva have more predictive power over infection than self-reported symptoms.

### Example 11: Materials and Methods (2)

[0113] Meta-Analysis of NCBI SRA Transcriptomics Datasets:

[0114] We carried out meta-analysis of RNA-seq datasets publicly available at the NCBI SRA database. Our criteria for choosing datasets where that human cells in culture were infected with a bacterial, viral, or fungal pathogen, and then the cellular transcriptome was sequenced along with that in a mock-infected control. We obtained a total of 71 relevant in vitro infection datasets. From these datasets, raw RNA sequencing reads in FASTQ format were downloaded, trimmed using BBDuk (BBMap v38.05)⁴⁹ and mapped using HISAT2 v2.1.0⁵⁰ to human genome assembly hg38. Using NCBI RefSeq genome annotation, we then counted the mapped reads assigned to gene or transcripts using FeatureCount (Subread v1.6.2)⁵¹.

[0115] First, we looked for genes that were upregulated in each infected dataset versus its matched mock infection. For each individual dataset, the infected replicates were compared to the corresponding mock replicates via the DESeq2 Wald test (v3.1.3)⁵², from which the fold change and Benjamini-Hochberg adjusted p-values were obtained. Correction for multiple testing was performed throughout. Next, we looked for the subset of these genes that was statistically enriched in infected datasets overall. DESeq2 results from individual datasets were ranked and combined based on the magnitude and consistency of upregulation across the datasets. Specifically, the gene rank, r_{g} is assigned to each individual dataset following the formula:

r_{g}=Rank(−log 10(Pval_{Adj})×fold change)

[0116] Next, to determine which gene is consistently upregulated across different studies, the rank is combined via rank sum statistics. With n studies, the rank sum for each gene, g, is calculated as:

RS_{g}=(Σᵢr_{g,i})

[0117] Hence, each gene is sorted based on the RS_{g}. We then filtered the gene list based on the within-study adjusted p-value and required that the gene to be significant (p_{adj}<0.05) in 90% of the datasets. As the result, we obtained 69 universal response genes ranked by the statistical significance comparing infected vs. mock groups and by the consistency across datasets.

[0118] Human Saliva Sample Collection, Handling, and RNA Preparation:

[0119] Samples SS4, SSS, SS12-SS21, SS24 and SS25 were collected under protocol 17-0562 (U. Colorado Anschutz Medical School; PI Poeschla), where adult participants were consented verbally and donated up to 5 mL of whole saliva and/or 50 mL whole blood per visit with no more than two visits per week and no more than 500 mL blood volume drawn per patient. Saliva was collected into Oragene saliva collection kit (DNA Genotek CP-100). The saliva is mixed with the stabilization solution in the collection kit and stored at room temperature for no longer than 2 weeks before being processed for RNA purification. Blood collected from patients with confirmed or suspected infection did not exceed the lesser of 50 mL or 3 mL per kilogram in an eight-week period. Diagnosis of these individuals was provided in the form of clinical notes.

[0120] Saliva samples from individuals SS1-SS3, SS6-SS11, SS22, and SS23 were collected under protocol 19-0696 (U. Colorado Boulder, PI Sawyer), where anonymous adults verbally consented and donated up to 2 mL of whole saliva. Saliva was collected into Oragene saliva collection kit as mentioned above. For these individuals, infection status was later determined by in silico metagenomic detection using GOTTCHA (v1.0b)⁵³ using the RNAseq reads (additional RNAseq sample preparation and analysis described below). We were able to detect sequencing reads mapping to CoV-NL63 or RSV genomes from the saliva of individual SS22 and SS23, respectively, so they were presumably infected with these pathogens at the time of saliva donation.

[0121] Saliva samples for apparently healthy individuals over a daily time course (SS26-SS32) were collected under a COVID-19-related sub-study of protocol 19-0696 (U. Colorado Boulder, PI Sawyer), where adult participants consented verbally and donated up to 2 mL of whole saliva per day of participation up to a total of 28 mL of whole saliva. The saliva was collected into Oragene saliva collection kit as mentioned above.

[0122] To purify RNA from saliva samples collected in Oragene saliva collection kit, we used 1 mL saliva 1:1 diluted in stabilization solution and followed the manufacturer recommended protocol by DNA Genotek to precipitate the nucleic acid. The RNA is further DNase-digested using Turbo DNase (Invitrogen #AM2238) and cleaned up using RNA clean-up and concentration micro-elute kit (Norgen #61000). The purified RNA is used for RT-qPCR or processed further for RNA-seq.

[0123] To prepare the total RNA for sequencing, we first spiked in ERCC RNA spike-in mix (ThermoFisher #4456740) into the saliva total RNA for downstream normalization. We depleted bacterial ribosomal RNA using pan-bacterial riboPOOL kit (siTOOLS #026). We then prepared the RNA for total RNA sequencing using KAPA RNA HyperPrep kit with RiboErase to remove human rRNA (Roche #KK8560). Finally, the saliva total RNA libraries were sequenced in 150 bp pair-end format using NovaSeq 6000 (Illumina) at the depth of 30 million reads.

[0124] Saliva samples for SARS-CoV-2-infected individuals (SS33-SS80), and matched SARS-CoV-2-negative individuals (SS81-SS100) were collected under protocol 20-0417 (U. Colorado Boulder, PI Sawyer), where adult participants 17 years of age or older (under a Waiver of Parental Consent) provided written consent. These samples were collected and tested for the SARS-CoV-2 virus during our campus COVID-19 testing initiative^{24,27} during the Fall 2020, Spring 2021, and Summer 2021 semesters. As part of this campus testing operation, university affiliates were asked to fill out a questionnaire to confirm that they did not present any symptoms consistent with COVID-19 at the time of sample donation, and to collect no less than 0.5 mL of saliva into a 5-mL screw-top collection tube. Saliva samples were heated at 95° C. for 30 min on site to inactivate the viral particles for safer handling, and then placed on ice or at 4° C. before being transported to the testing laboratory for RT-qPCR-based SARS-CoV-2 testing performed on the same day. Samples were then kept in −80 C until RNA preparation. The total RNA of the remaining saliva samples was then purified using TRIzol LS reagent (ThermoFisher #10296028) followed by GeneJET RNA cleanup and concentration kit (ThermoFisher #K0841). The purified total RNA was used for RT-qPCR following the steps described below.

[0125] Additional saliva samples for general assay development were collected under protocol 20-0068 (U. Colorado Boulder, PI Sawyer), where anonymous adult participants were verbally consented and donated up to 2 mL of whole saliva for use as a reagent in optimization and limit of detection experiments.

[0126] Analysis of High-Throughput Transcriptomics Data from Human Saliva Samples”

[0127] To profile human transcriptomic changes in human saliva samples, raw RNA sequencing reads in FASTQ format were obtained, trimmed using BBDuk (BBTools v38.05)⁴⁹, and mapped using HISAT2 v2.1.0⁵⁰ to human genome assembly hg38 along with ERCC spike-in sequence reference. Using NCBI RefSeq genome annotation (GRCh38.p13), we then counted the mapped reads assigned to gene or transcripts using FeatureCount (Subread v1.6.2)⁵¹. Read counts was first normalized using R package RUVseq (v1.28.0)⁵⁴ to account for library size factors based on the ERCC spike-in counts. Individual samples were then separated into infected and non-infected groups and the differential expression of genes were determined via DESeq2 (v3.1.3) Wald test⁵², from which the fold change and Benjamini-Hochberg adjusted p-values were obtained.

[0128] RT-qPCR Analysis of Universal Response Genes in Human Saliva:

[0129] Multiplex RT-qPCR analysis for the quantitative detection of human gene transcripts was carried out using customized and multiplexed TaqMan primer and probe mixes. Understanding that the contamination of genomic DNA often introduces quantification bias when measuring host gene expression, we explicitly designed primers that span exon junctions and limit the assay elongation time so that only the host RNA is reverse transcribed and amplified. As each transcript varies in its expression magnitude, we assigned genes into multiplex groups based on similar expression magnitudes observed in the meta-analysis of in vivo datasets and in human saliva. This minimizes competition of amplification reagents. Specifically, to determine the host gene expression levels, 1.5 μL of customized TaqMan multiplex probes were mixed with 5 μL 4×TaqPath 1-step multiplex master mix (ThermoFisher #A28526), 5 μL of saliva total RNA, and 8.5 μL of nuclease free water. The RT-qPCR assay was carried out on QuantStudio3 Real-time PCR system (ThermoFisher) consisting of a reverse transcription stage (25° C. for 2 min, 50° C. for 15 min, 95° C. for 2 min) followed by 45 cycles of PCR stage (95° C. for 3 s, 55° C. for 30 s, with a 1.6° C./s ramp-up and ramp-down rate). The cycle threshold (Ct) values were used to calculate relative fold change using delta delta Ct method. For the choice of internal control genes, we combined the meta-analysis (FIG. 29; cell culture experiments) and the saliva RNA-seq datasets (FIG. 30; human samples) to select genes for which the expression level remained most constant and abundant across the various conditions inherent to these experiments.

[0130] Infection of A549 Cells with Influenza a Virus:

[0131] For influenza A virus infection, human lung epithelial cells (A549s) where plated at a concentration of 1×10⁶ cells/well in a 6-well plate. The next day, the cells were infected with influenza A virus (Influenza A/Udorn/307/72) at an MOI=0.1 in serum-free media containing 1.0% bovine serum albumin. After 1 hour incubation, the inoculum was removed and replaced with growth media containing 1 ug/mL of N-acetylated trypsin. 24 hours post-infection, total RNA was harvest using QIAGEN RNeasy Mini kit (QIAGEN #74104).

[0132] Infection of Huh7 Cells with SARS-CoV-2:

[0133] Human Hepatoma (Huh7) cells (gift from Charles Rice, Rockefeller University) were grown in 1×DMEM (ThermoFisher cat. no. 12500062) supplemented with 2 mM L-glutamine (Hyclone cat. no. H30034.01), non-essential amino acids (Hyclone cat. no. SH30238.01), and 10% heat inactivated Fetal Bovine Serum (FBS) (Atlas Biologicals cat. no. EF-0500-A). The virus strain used for the assay was SARS-CoV2, USA WA January/2020, passage 3. Virus stocks were obtained from BEI Resources and amplified in Vero E6 cells to Passage 3 (P3) with a titer of 5.5×10⁵ PFU/mL. Cells were resuspended to 6.0×10⁵ cells/mL in 10% DMEM and seeded at 2 mL/well in 6-well plates. The plates were then incubated for approximately 24 hours (h) at 37° C., 5% CO₂ for cells to adhere prior to infection. Cell were infected with SARS-CoV-2 at an MOI of 0.01. Samples were harvested at 0, 2, 4, 8, 12, 24, and 48 hours post infection in 200 μl TRIzol reagent for RNA extractions following the manufacture's protocol.

[0134] The terminology used herein is for describing embodiments and is not intended to be limiting. As used herein, the singular forms “a,” “and” and “the” include plural referents, unless the content and context clearly dictate otherwise. Thus, for example, a reference to “a biomarker” may include a combination of two or more such biomarkers. Unless defined otherwise, all scientific and technical terms are to be understood as having the same meaning as commonly used in the art to which they pertain. As used herein, “about” or “approximately” means within 10% of a stated concentration range or within 10% of a stated time frame.

[0135] The phrase “and/or,” as used herein in the specification and in the claims, should be understood to mean “either or both” of the elements so conjoined, i.e., elements that are conjunctively present in some cases and disjunctively present in other cases. Multiple elements listed with “and/or” should be construed in the same fashion, i.e., “one or more” of the elements so conjoined. Other elements may optionally be present other than the elements specifically identified by the “and/or” clause, whether related or unrelated to those elements specifically identified. Thus, as a non-limiting example, a reference to “A and/or B”, when used in conjunction with open-ended language such as “comprising” can refer, in one embodiment, to A only (optionally including elements other than B); in another embodiment, to B only (optionally including elements other than A); in yet another embodiment, to both A and B (optionally including other elements); etc.

[0136] Nucleic acids and/or other moieties of the invention may be isolated or “extracted.” As used herein, “isolated” means separate from at least some of the components with which it is usually associated whether it is derived from a naturally occurring source or made synthetically, in whole or in part. Nucleic acids and/or other moieties of the invention may be purified. As used herein, purified means separate from the majority of other compounds or entities. A compound or moiety may be partially purified or substantially purified. Purity may be denoted by weight measure and may be determined using a variety of analytical techniques such as but not limited to mass spectrometry, HPLC, etc.

[0137] The term “primer,” as used herein, refers to an oligonucleotide capable of acting as a point of initiation of DNA synthesis under suitable conditions. Such conditions include those in which synthesis of a primer extension product complementary to a nucleic acid strand is induced in the presence of four different nucleoside triphosphates and an agent for extension (for example, a DNA polymerase or reverse transcriptase) in an appropriate buffer and at a suitable temperature.

[0138] A primer is preferably a single-stranded DNA. The appropriate length of a primer depends on the intended use of the primer but typically ranges from about 6 to about 225 nucleotides, including intermediate ranges, such as from 15 to 35 nucleotides, from 18 to 75 nucleotides and from 25 to 150 nucleotides. Short primer molecules generally require cooler temperatures to form sufficiently stable hybrid complexes with the template. A primer need not reflect the exact sequence of the template nucleic acid but must be sufficiently complementary to hybridize with the template. The design of suitable primers for the amplification of a given target sequence is well known in the art and described in the literature cited herein.

[0139] As used herein, a biological marker (“biomarker” or “marker”) is a characteristic that is objectively measured and evaluated as an indicator of normal biologic processes, pathogenic processes, or pharmacological responses to therapeutic interventions, consistent with NIH Biomarker Definitions Working Group (1998). Markers can also include patterns or ensembles of characteristics indicative of particular biological processes. The biomarker measurement can increase or decrease to indicate a particular biological event or process. In addition, if the biomarker measurement typically changes in the absence of a particular biological process, a constant measurement can indicate occurrence of that process. In a preferred embodiment a biomarker includes one or more RNA transcripts that may be indicative of infection or other normal or abnormal physiological process.

[0140] As referred to herein, the terms “nucleic acid”, “nucleic acid molecules” “oligonucleotide”, “polynucleotide”, and “nucleotides” may interchangeably be used. The terms are directed to polymers of deoxyribonucleotides (DNA), ribonucleotides (RNA), and modified forms thereof in the form of a separate fragment or as a component of a larger construct, linear or branched, single stranded, double stranded, triple stranded, or hybrids thereof. The term also encompasses RNA/DNA hybrids. The polynucleotides may include sense and antisense oligonucleotide or polynucleotide sequences of DNA or RNA. The DNA molecules may be, for example, but not limited to: complementary DNA (cDNA), genomic DNA, synthesized DNA, recombinant DNA, or a hybrid thereof. The RNA molecules may be, for example, but not limited to: ssRNA or dsRNA and the like. The terms further include oligonucleotides composed of naturally occurring bases, sugars, and covalent internucleoside linkages, as well as oligonucleotides having non-naturally occurring portions, which function similarly to respective naturally occurring portions. The terms “nucleic acid segment” and “nucleotide sequence segment,” or more generally “segment,” will be understood by those in the art as a functional term that includes both genomic sequences, ribosomal RNA sequences, transfer RNA sequences, messenger RNA sequences, operon sequences, and smaller engineered nucleotide sequences that are encoded or may be adapted to encode, peptides, polypeptides, or proteins. All nucleic acid primers, such as SEQ IN NOs. 445-468, are presented in the 5′ to 3′ prime direction unless otherwise noted.

[0141] As used herein, “complementary” refers to the ability of a single strand of a polynucleotide (or portion thereof) to hybridize to an anti-parallel polynucleotide strand (or portion thereof) by contiguous base-pairing between the nucleotides (that is not interrupted by any unpaired nucleotides) of the anti-parallel polynucleotide single strands, thereby forming a double-stranded polynucleotide between the complementary strands. A first polynucleotide is said to be “completely complementary” to a second polynucleotide strand if each and every nucleotide of the first polynucleotide forms base-paring with nucleotides within the complementary region of the second polynucleotide. A first polynucleotide is not completely complementary (i.e., partially complementary) to the second polynucleotide if one nucleotide in the first polynucleotide does not base pair with the corresponding nucleotide in the second polynucleotide. The degree of complementarity between polynucleotide strands has significant effects on the efficiency and strength of annealing or hybridization between polynucleotide strands. This is of particular importance in amplification reactions, which depend upon binding between polynucleotide strands. An oligonucleotide primer is “complementary” to a target polynucleotide if at least 50% (preferably, 60%, more preferably 70%, 80%, still more preferably 90% or more) nucleotides of the primer form base-pairs with nucleotides on the target polynucleotide.

[0142] As referred to herein, the term “database” is directed to an organized collection of nucleotide sequence information that may be stored in a digital form. In some embodiments, the database may include any sequence information. In some embodiments, the database may include the genome sequence of a subject or a microorganism. In some embodiments, the database may include expressed sequence information, such as, for example, an EST (expressed sequence tag) or cDNA (complementary DNA) databases. In some embodiments, the database may include non-coding sequences (that is, untranslated sequences), such as, for example, the collection of RNA families (Rfam) which contains information about non-coding RNA genes, structured cis-regulatory elements and self-splicing RNAs. In exemplary embodiments, the databases may be selected from redundant or non-redundant GenBank databases (which are the NIH genetic sequence database, an annotated collection of all publicly available DNA sequences). Exemplary databases may be selected from, but not limited to: GenBank CDS (Coding sequences database), PDB (protein database), SwissProt database, PIR (Protein Information Resource) database, PRF (protein sequence) database, EMBL Nucleotide Sequence database, and the like, or any combination thereof.

[0143] As used herein, the term “detection” refers to the qualitative determination of the presence or absence of a microorganism in a sample. The term “detection” also includes the “identification” of a microorganism, i.e., determining the genus, species, or strain of a microorganism according to recognized taxonomy in the art and as described in the present specification. The term “detection” further includes the quantitation of a microorganism in a sample, e.g., the copy number of the microorganism in a microliter (or a milliliter or a liter) or a microgram (or a milligram or a gram or a kilogram) of a sample. The term “detection” also includes the identification of an infection in a subject or sample.

[0144] As used herein the term “pathogen” refers to an organism, including a microorganism, which causes disease in another organism (e.g., animals and plants) by directly infecting the other organism, or by producing agents that causes disease in another organism (e.g., bacteria that produce pathogenic toxins and the like). As used herein, pathogens include, but are not limited to bacteria, protozoa, fungi, nematodes, viroids and viruses, or any combination thereof, wherein each pathogen is capable, either by itself or in concert with another pathogen, of eliciting disease in vertebrates including but not limited to mammals, and including but not limited to humans. As used herein, the term “pathogen” also encompasses microorganisms which may not ordinarily be pathogenic in a non-immunocompromised host.

[0145] The term “infection,” or “infect” as used herein is directed to the presence of a microorganism within a subject body and/or a subject cell. For example, a virus may be infecting a subject cell. A parasite (such as, for example, a nematode) may be infecting a subject cell/body. In some embodiments, the microorganism may comprise a virus, a bacteria, a fungi, a parasite, or combinations thereof. According to some embodiments the microorganism is a virus, such as, for example, dsDNA viruses (such as, for example, Adenoviruses, Herpesviruses, Poxviruses), ssDNA viruses (such as, for example, Parvoviruses), dsRNA viruses (such as, for example, Reoviruses), (+) ssRNA viruses (+) sense RNA (such as, for example, Picornaviruses, Togaviruses), (−) ssRNA viruses (−) sense RNA (such as, for example, Orthomyxoviruses, Rhabdoviruses), ssRNA-RT viruses (+) sense RNA with DNA intermediate in life-cycle (such as, for example, Retroviruses), dsDNA-RT viruses (such as, for example, Hepadnaviruses). In some embodiments, the microorganism is a bacteria, such as, for example, a gram negative bacteria, a gram positive bacteria, and the like. In some embodiments, the microorganism is a fungi, such as yeast, mold, and the like. In some embodiments, the microorganism is a parasite, such as, for example, protozoa and helminths or the like. In some embodiments, the infection by the microorganism may inflict a disease and/or a clinically detectable symptom to the subject. In some embodiments, infection by the microorganism may not cause a clinically detectable symptom. In some embodiments, the microorganism is a symbiotic microorganism. In additional embodiments, the microorganism may comprise archaea, protists; microscopic plants (green algae), plankton, and the planarian. In some embodiments, the microorganism is unicellular (single-celled). In some embodiments, the microorganism is multicellular.

[0146] As used herein, the term “asymptomatic” refers to an individual who does not exhibit physical symptoms characteristic of being infected with a given pathogen, or a given combinations of pathogens.

[0147] The target biomarkers of this invention may be used for diagnostic and prognostic purposes, as well as for therapeutic, drug screening and patient stratification purposes (e.g., to group patients into a number of “subsets” for evaluation), as well as other purposes described herein.

[0148] Some embodiments of the invention comprise detecting in a sample from a patient, a level of a biomarker, wherein the presence or expression levels of the biomarker are indicative of infection or possible infection by one or more pathogens. As used herein, the term “biological sample” or “sample” includes a sample from any bodily fluid or tissue. Biological samples or samples appropriate for use according to the methods provided herein include, without limitation, blood, serum, urine, saliva, tissues, cells, and organs, or portions thereof. A “subject” is any organism of interest, generally a mammalian subject, and preferably a human subject.

[0149] Any isothermal amplification protocol can be used according to the methods provided herein. Exemplary types of isothermal amplification include, without limitation, nucleic acid sequence-based amplification (NASBA), loop-mediated isothermal amplification (LAMP), strand displacement amplification (SDA), helicase-dependent amplification (HDA), nicking enzyme amplification reaction (NEAR), signal mediated amplification of RNA technology (SMART), rolling circle amplification (RCA), isothermal multiple displacement amplification (EVIDA), single primer isothermal amplification (SPIA), recombinase polymerase amplification (RPA), and polymerase spiral reaction (PSR, available at nature.com/articles/srep12723 on the World Wide Web). In some cases, a forward primer is used to introduce a T7 promoter site into the resulting DNA template to enable transcription of amplified RNA products via T7 RNA polymerase. In other cases, a reverse primer is used to add a trigger sequence of a toehold sequence domain.

[0150] As used herein, the term “amplified” refers to polynucleotides that are copies of a particular polynucleotide, produced in an amplification reaction. An amplified product, according to the invention, may be DNA or RNA, and it may be double-stranded or single-stranded. An amplified product is also referred to herein as an “amplicon”. As used herein, the term “amplicon” refers to an amplification product from a nucleic acid amplification reaction. The term generally refers to an anticipated, specific amplification product of known size, generated using a given set of amplification primers.

TABLE 1
Comparison of gold standard tests to invention's lateral flow assay stick

| | | | Avg. | | | | |
|---|---|---|---|---|---|---|---|
| | | | time to | Able to | | | |
| | | | detection | detect | | | |
| Diagnostic | | | post- | unknown | | Trained | |
| Test Type | Sensitivity | Specificity | exposure | pathogens? | Laboratory? | personnel? | Cost |
| Serology- | High | Moderate | Late | No | Yes-most | Yes-most | $$ |
| based | | | | | cases | cases | |
| Cultures | Moderate | Moderate | Late | Only if | Yes | Yes | $$ |
| | | | | clinically | | | |
| | | | | suspected | | | |
| | | | | & able to be | | | |
| | | | | cultured | | | |
| PCR | High | High | Mid | No | Yes | Yes | $$$ |
| Our | High* | Moderate* | Earliest | Yes | No | No | $ |
| Product | | | | | | | |

TABLE 2
Primers used for the detection of SARS-CoV-2 (COVID-19)

| | | | | | SEQ ID |
|---|---|---|---|---|---|
| Name | Description | Oligonucleotide sequence (5′−>3′) | Label | Conc. | NO. |
| 2019-nCoV_N1-F | 2019-nCoV_N1 | 5′-GAC CCC AAA ATC AGC GAA | None | 20 μM | 469 |
| | Forward Primer | AT-3′ | | | |
| 2019-nCoV_N1-R | 2019-nCoV_N1 | 5′-TCT GGT TAC TGC CAG TTG | None | 20 μM | 470 |
| | Reverse Primer | AAT CTG-3′ | | | |
| 2019-nCoV_N1-P | 2019-nCoV_N1 | 5′-FAM-ACC CCG CAT TAC GTT | FAM, | 5 μM | 471 |
| | Probe | TGG ACC-BHQ1-3′ | BHQ-1 | | |
| 2019-nCoV_N2-F | 2019-nCoV_N2 | 5′-TTA CAA ACA TTG GCC GCA | None | 20 μM | 472 |
| | Forward Primer | AA-3′ | | | |
| 2019-nCoV_N2-R | 2019-nCoV_N2 | 5′-GCG CGA CAT TCC GAA | None | 20 μM | 473 |
| | Reverse Primer | GAA-3′ | | | |
| 2019-nCoV_N2-P | 2019-nCoV_N2 | 5′-FAM-ACA ATT TGC CCC CAG | FAM, | 5 μM | 474 |
| | Probe | CGC TTC AG-BHQ1-3′ | BHQ-1 | | |
| 2019-nCoV_N3-F | 2019-nCoV_N3 | 5′-GGG AGC CTT GAA TAC ACC | None | 20 μM | 475 |
| | Forward Primer | AAA A-3′ | | | |
| 2019-nCoV_N3-R | 2019-nCoV_N3 | 5′-TGT AGC ACG ATT GCA TTG- | None | 20 μM | 476 |
| | Reverse Primer | 3′ | | | |
| 2019-nCoV_N3-P | 2019-nCoV_N3 | 5′-FAM-AYC ACA TTG GCA CCC | FAM, | 5 μM | 477 |
| | Probe | GCA ATC CTG-BHQ1-3′ | BHQ-1 | | |
| RP-F | RNAse P Forward | 5′-AGA TTT GGA CCT GCG AGC | None | 20 μM | 478 |
| | Primer | G-3′ | | | |
| RP-R | RNAse P Reverse | 5′-GAG CGG CTG TCT CCA CAA | None | 20 μM | 479 |
| | Primer | GT-3′ | | | |
| RP-P | RNAse P | 5′-FAM - TTC TGA CCT GAA | FAM, | 5 μM | 480 |
| | Probe | GGC TCT GCG CG - BHQ-1-3′ | BHQ-1 | | |

TABLE 3
Transcriptomics datasets used for the discovery of human universal response genes

| | | | Virus, | Hours | |
|---|---|---|---|---|---|
| | | | Bacteria, | Post- | Sequencing |
| SRP Index | Human cell line | Pathogen | Fungus | Infection | Data Type |
| SRP044763 | IMR90 | Adenovirus | Virus | 24 | mRNA |
| SRP163661 | MRC5 | Adenovirus | Virus | 24 | Total |
| SRP202003 | HepG2 | Crimean-Congo hemorrhagic fever virus | Virus | 72 | Total |
| SRP078309 | A549 | Dengue Virus 2 | Virus | 36 | Total |
| SRP130978 | HUH751 | Dengue Virus 2 | Virus | NA | Total |
| SRP132737 | Huh7 | Dengue Virus 2 | Virus | 18 | Total |
| SRP188490 | HEK293 | Dengue Virus 2 | Virus | 18 | Total |
| SRP060253 | AGS | Ebola Virus | Virus | NA | Total |
| SRP101856 | DC | Ebola Virus | Virus | 24 | Total |
| SRP111145 | ARPE19 | Ebola Virus | Virus | 24 | Total |
| SRP255890 | B Cell | Ebola Virus | Virus | NA | Total |
| SRP272684 | B Cell Lymphoma | Ebola Virus | Virus | 24 | Total |
| SRP131318 | Rhabdomyosarcoma | Enterovirus | Virus | 6 | Total |
| SRP212863 | HUVEC | Hantaan Orthohantavirus | Virus | 72 | Total |
| SRP158789 | HepG2 | Hepatitis B Virus | Virus | 72 | Total |
| SRP187206 | HUH751 | Hepatitis C Virus | Virus | 148 | Total |
| SRP091538 | HepG2 | Hepatitis E Virus | Virus | 120 | Total |
| SRP117344 | KMB17 | Herpes Simplex Virus 1 | Virus | 48 | Total |
| SRP154536 | HEK293 | Herpes Simplex Virus 1 | Virus | 4 | Total |
| SRP163661 | MRC5 | Herpes Simplex Virus 1 | Virus | 9 | Total |
| SRP177947 | THP1 | Herpes Simplex Virus 1 | Virus | 24 | Total |
| SRP189489 | HFF | Herpes Simplex Virus 1 | Virus | 8 | Total |
| SRP065236 | HFF | Herpes Simplex Virus 2 | Virus | 8 | Total |
| SRP065236 | EC | Human Cytomegalovirus | Virus | 48 | Total |
| SRP065236 | HFF | Human Cytomegalovirus | Virus | 48 | Total |
| SRP065236 | NPC | Human Cytomegalovirus | Virus | 48 | Total |
| SRP163661 | MRC5 | Human Cytomegalovirus | Virus | 48 | Total |
| SRP266618 | NTT | Human Cytomegalovirus | Virus | 24 | Total |
| SRP065236 | CD4 + T Cell | Human Immunodeficiency Virus 1 | Virus | 120 | Total |
| SRP155217 | CD4 + T Cell | Human Immunodeficiency Virus 1 | Virus | 72 | Total |
| SRP155822 | Ileum organoid | Human Norovirus | Virus | 48 | Total |
| SRP223234 | HFK | Human Papillomavirus | Virus | NA | Total |
| SRP253951 | A549 | Human Parainfluenza Virus 3 | Virus | 24 | Total |
| SRP103819 | HNEpC | Human Rhinovirus | Virus | 48 | Total |
| SRP161185 | ATII | Influenza A Virus | Virus | 24 | Total |
| SRP230823 | HeLa | Influenza A Virus | Virus | 24 | Total |
| SRP234025 | A549 | Influenza A Virus | Virus | 48 | Total |
| SRP253951 | A549 | Influenza A Virus | Virus | 9 | Total |
| SRP272285 | A549 | Influenza A Virus | Virus | 6 | Total |
| SRP277269 | 293T | Influenza A Virus | Virus | 6 | Total |
| SRP281173 | A549 | Influenza A Virus | Virus | 12 | Total |
| SRP170549 | Calu3 | MERS-CoV | Virus | 24 | Total |
| SRP227272 | Calu3 | MERS-CoV | Virus | 24 | mRNA |
| SRP096169 | HFF | Orf Virus | Virus | 8 | Total |
| SRP277439 | HEK293 | Porcine Rubulavirus | Virus | 12 | Total |
| SRP229586 | A549 | Respiranny Syncytial Virus | Virus | 36 | Total |
| SRP229586 | H292 | Respiranny Syncytial Virus | Virus | 36 | Total |
| SRP229586 | HBEC | Respiranny Syncytial Virus | Virus | 36 | Total |
| SRP253951 | A549 | Respiranny Syncytial Virus | Virus | 24 | Total |
| SRP115192 | HSAEpC | Rift Valley Fever Virus | Virus | 18 | Total |
| SRP094462 | HInEpC | Rotavirus | Virus | 6 | Total |
| SRP253951 | A549-ACE2 | SARS-CoV-2 | Virus | 24 | Total |
| SRP270817 | PHAE | SARS-CoV-2 | Virus | 48 | Total |
| SRP273473 | DC | SARS-CoV-2 | Virus | 2 | Total |
| SRP273473 | MAC | SARS-CoV-2 | Virus | 2 | Total |
| SRP278618 | iPSC-derived | SARS-CoV-2 | Virus | 48 | Total |
| | cardiomyocyte | | | | |
| SRP081284 | MeWo | Varicella-zoster Virus | Virus | 24 | Total |
| SRP225661 | A549 | West Nile Virus | Virus | 24 | Total |
| SRP142592 | hNSC | Zika Virus | Virus | 72 | Total |
| SRP251704 | A549 | Zika Virus | Virus | 48 | Total |
| SRP253197 | HepG2 | Zika Virus | Virus | 48 | Total |
| SRP296743 | PBMC | Aspergillus fumigatus | Fungus | 24 | Total |
| SRP296743 | PBMC | Candida albicans | Fungus | 24 | Total |
| SRP296743 | PBMC | Rhizopus oryzae | Fungus | 24 | Total |
| SRP285913 | HeLa | Chlamydia trachomatis | Bacteria | 44 | Total |
| SRP321546 | DLD-1 | Fusobacterium nucleatum | Bacteria | 24 | Total |
| SRP321940 | Primly human | Listeria monocytogenes | Bacteria | 5 | Total |
| | trophoblasts | | | | |
| ERP020415 | THP-1 | Mycobacterium tuberculosis | Bacteria | 48 | Total |
| ERP115551 | hBMECs | Neisseria meningitidis | Bacteria | 6 | mRNA |
| SRP263458 | HUVEC | Staphylococcus aureus | Bacteria | 16 | Total |
| SRP072326 | A549 | Streptococcus pneumoniae | Bacteria | 2 | Total |

TABLE 4
The 69 universal response genes in humans.

| RefSeq Accession | Gene Symbol |
|---|---|
| NM_001547 | IFIT2 |
| NM_022168 | IFIH1 |
| NM_016323 | HERC5 |
| NM_014314 | DDX58 |
| NM_080657 | RSAD2 |
| NM_021127 | PMAIP1 |
| NM_001964 | EGR1 |
| NM_001945 | HBEGF |
| NM_005532 | IFI27 |
| NM_000584 | CXCL8 |
| NM_005252 | FOS |
| NM_014330 | PPP1R15A |
| NM_017414 | USP18 |
| NM_152542 | PPM1K |
| NM_014470 | RND1 |
| NM_006187 | OAS3 |
| NM_005101 | ISG15 |
| NM_001570 | IRAK2 |
| NM_001565 | CXCL10 |
| NM_022750 | PARP12 |
| NM_020529 | NFKBIA |
| NM_002463 | MX2 |
| NM_006820 | IFI44L |
| NM_001561 | TNFRSF9 |
| NM_006734 | HIVEP2 |
| NM_012420 | IFIT5 |
| NM_024119 | DHX58 |
| NM_021035 | ZNFX1 |
| NM_002228 | JUN |
| NM_017554 | PARP14 |
| NM_001432 | EREG |
| NM_012118 | NOCT |
| NM_003764 | STX11 |
| NM_002535 | OAS2 |
| NM_003733 | OASL |
| NM_003407 | ZFP36 |
| NM_007315 | STAT1 |
| NM_022147 | RTP4 |
| NM_004419 | DUSP5 |
| NM_017631 | DDX60 |
| NM_000958 | PTGER4 |
| NM_004420 | DUSP8 |
| NM_016584 | IL23A |
| NM_000201 | ICAM1 |
| NM_172140 | IFNL1 |
| NM_030641 | APOL6 |
| NM_002053 | GBP1 |
| NM_052941 | GBP4 |
| NM_002462 | MX1 |
| NM_138287 | DTX3L |
| NM_015907 | LAP3 |
| NM_005514 | HLA-B |
| NM_017633 | TENT5A |
| NM_003641 | IFITM1 |
| NM_001165 | BIRC3 |
| NM_002999 | SDC4 |
| NM_002038 | IFI6 |
| NM_004417 | DUSP1 |
| NM_001549 | IFIT3 |
| NM_006435 | IFITM2 |
| NM_006084 | IRF9 |
| NM_004335 | BST2 |
| NM_006509 | RELB |
| NM_080745 | TRIM69 |
| NM_033390 | ZC3H12C |
| NM_003141 | TRIM21 |
| NM_002176 | IFNB1 |
| NM_003745 | SOCS1 |
| NM_006417 | IFI44 |

TABLE 5
Human saliva samples used in this study

| Sample ID | Collection Date | Diagnosis / Infectious agent | Study Site |
|---|---|---|---|
| SS01-15 | March-December | Not detected, presumed healthy | University of Colorado |
| | 2019 | | Anschutz Medical School |
| | | | and Boulder |
| SS16 | September 2019 | Patient with gastroenteritis caused by Vibrio cholera. Received | University of Colorado |
| | | one dose of Cipro and ceftriaxone before saliva sample taken. | Anschutz Medical School |
| SS17 | September 2019 | Patient with Methicillin-resistant Staphylococcus aureus | |
| | | bacteremia and cervical osteomyelitis, discitis, and prevertebral | |
| | | abscess | |
| SS18 | September 2019 | Patient with VZV meningitis. Herpes Zoster involving left V1- | |
| | | V2 dermatome without ocular involvement | |
| SS19 | May, 2020 | Patient being treated for SARS-CoV-2 infection. Saliva | |
| SS20 | May, 2020 | samples taken several days (n = 4-7) following diagnosis. | |
| SS21 | May, 2020 | | |
| SS22 | Janualy, 2020 | University affiliates whose saliva contained RNAseq reads | University of Colorado |
| | | mapping to CoV-NL63 | Boulder |
| SS23 | Februaly, 2020 | University affiliates whose saliva contained RNAseq reads | |
| | | mapping to RSV | |
| SS24 | Feb, 2019 | Patient with Coccidioidomycosis (Valley Fever) | University of Colorado |
| SS25 | December, 2019 | Patient undergoing sepsis, likely 2.2 pyelonephritis by | Anschutz Medical School |
| | | Escherichia coli | |
| SS26-32 | May 2020- | 7 apparently healthy individuals who provided saliva samples | University of Colorado |
| | August 2020 | daily for 11 days | Boulder |
| SS33-80 | August 2020- | 48 covid-positive (but asymptomatic or pre-symptomatic) | |
| | December 2020 | university affiliates | |
| SS81-100 | | 20 covid-negative and apparently healthy university affiliates | |

TABLE 6
Top 30 differentially up- and down- regulated genes from
comparison between infected and healthy saliva

| Gene | Log2(Fold | Adjusted P- |
|---|---|---|
| Symbols | Change) | value |
| CHRNA5 | 6.05 | 9.35E−76 |
| IL2RA | 6.07 | 1.08E−71 |
| STS | 6.02 | 7.91E−69 |
| BAG5 | 5.80 | 9.31E−64 |
| HBD | 7.01 | 3.53E−53 |
| POR | 6.03 | 4.83E−50 |
| LCN10 | 6.38 | 4.06E−46 |
| C10orf55 | 7.06 | 9.76E−44 |
| TWIST1 | 6.35 | 1.08E−43 |
| CA2 | 6.97 | 1.19E−43 |
| NR0B1 | 7.13 | 7.96E−43 |
| GALE | 5.83 | 1.04E−42 |
| TENT5A | 6.15 | 2.69E−42 |
| WRN | 5.11 | 3.91E−42 |
| NOS3 | 5.95 | 5.09E−41 |
| HBEGF | 5.00 | 8.94E−41 |
| DRD4 | 6.13 | 5.62E−40 |
| NCMAP | 6.31 | 3.29E−39 |
| REN | 5.61 | 7.10E−39 |
| FGG | 4.98 | 2.07E−37 |
| HADHA | 5.01 | 8.57E−37 |
| HBG2 | 7.61 | 2.11E−36 |
| HOXD13 | 4.86 | 2.50E−36 |
| KITLG | 5.31 | 1.18E−35 |
| CHRNB1 | 5.74 | 1.08E−32 |
| ITGB3 | 4.59 | 2.63E−32 |
| BST2 | 6.03 | 3.66E−32 |
| OR56B1 | 7.34 | 4.66E−31 |
| HBG1 | 8.01 | 5.45E−31 |
| RND1 | 7.31 | 6.27E−31 |
| LOC102723665 | −3.38 | 1.86E−06 |
| GCSAM | −4.12 | 1.84E−05 |
| TAAR9 | −5.50 | 2.94E−05 |
| CDCA7L | −3.59 | 1.16E−04 |
| MIR320B2 | −4.81 | 1.47E−04 |
| HULC | −5.84 | 1.49E−04 |
| ZNF235 | −3.25 | 2.40E−04 |
| SLC39A12 | −3.05 | 3.28E−04 |
| IVNS1ABP | −3.87 | 3.58E−04 |
| KLHDC4 | −3.96 | 4.01E−04 |
| SERPINB5 | −3.57 | 4.41E−04 |
| L0C101927143 | −4.42 | 4.45E−04 |
| VAV2 | −3.29 | 4.68E−04 |
| DSEL | −4.39 | 5.69E−04 |
| RPL22 | −2.67 | 7.18E−04 |
| LINC01085 | −3.48 | 7.23E−04 |
| ERVW−1 | −3.94 | 8.02E−04 |
| SLC25A25−AS1 | −3.54 | 8.58E−04 |
| THOC5 | −2.59 | 9.56E−04 |
| UXT−AS1 | −4.49 | 1.21E−03 |
| TRI−AAT1−1 | −3.34 | 1.37E−03 |
| AKAP4 | −3.07 | 1.76E−03 |
| TADA2A | −2.58 | 2.03E−03 |
| LRRC7 | −3.49 | 2.71E−03 |
| LEMD1−AS1 | −3.55 | 3.02E−03 |
| GNG14 | −3.82 | 3.37E−03 |
| ZNF461 | −3.55 | 3.77E−03 |
| LINC01781 | −2.66 | 4.07E−03 |
| SAMD13 | −3.46 | 4.65E−03 |
| SLAMF8 | −1.81 | 5.00E−03 |

What is claimed is:

1. A method of detecting a host RNA transcript biomarker comprising the step of:
collecting a bodily fluid sample from a subject containing an RNA transcript biomarker;
converting said RNA transcript biomarker into a DNA probe, such as a double stranded DNA (dsDNA), single stranded DNA (ssDNA), or and a hybrid double stranded DNA (dsDNA) probe having:
a dsDNA target sequence;
a single stranded DNA (ssDNA) annealing region; and
a ssDNA target capture region;
introducing said hybrid dsDNA probe to a DNA conjugated reporter probe, wherein said ssDNA annealing region on hybrid dsDNA probe is complementary to a ssDNA annealing region of said DNA conjugated reporter probe such that the two probes are coupled together in a solution;
introducing the hybrid dsDNA probe and DNA conjugated reporter probe solution to a lateral flow assay test strip;
passing the solution through at least one detection zone on said lateral flow assay test strip, wherein said detection zone contains a plurality of embedded target capture probes having a ssDNA region that is complementary to said ssDNA target capture region on said hybrid dsDNA probe;
forming an immobilized complex aggregate comprising said hybrid dsDNA probe, said DNA conjugated reporter probe, and said target capture probe by annealing the complementary target capture region on said hybrid dsDNA probe with the target capture region on said target capture probe;
allowing a plurality of immobilized complex aggregates to form in said detection zone such that a detectable signal is produced.

2. The method of claim 1 wherein said bodily fluid sample comprises a saliva sample.

3. The method of claim 1 wherein said step of converting comprises the step of converting said RNA transcript biomarker into DNA probe through an isothermal reverse transcription recombinase polymerase amplification (RT-RPA) reaction.

4. The method of claim 3 wherein the reagents necessary to produce an isothermal reverse transcription recombinase polymerase amplification (RT-RPA) reaction are pre-loaded into a reaction cylinder.

5. The method of claim 1 wherein said dsDNA target sequence is coupled with said ssDNA annealing region and said ssDNA target capture region through a linker.

6. The method of claim 5 wherein said linker comprises a tri-carbon chain spacer (C3) linker.

7. The method of claim 1 wherein said DNA conjugated reporter probe comprises a conjugated gold nanoparticle (GNP) probe.

8. The method of claim 7 wherein said conjugated (GNP) probe comprises a GNP coupled to said ssDNA annealing region through a thiol, PEG₁₈, and PolyA construct.

9. The method of claim 1 wherein said target capture probe comprises a target capture probe having an immobilized streptavidin base tetramer coupled with a biotin-TEG linker that may further be coupled with said ssDNA target capture probe sequence that is complementary to said target capture region on said hybrid streptavidin.

10. The method of any of claims 1 and 8 wherein said lateral flow assay test strip further comprises:
a conjugate pad in fluid communication with a membrane that allows said solution to flow towards an absorbent pad via capillary action, wherein said absorbent pad is positioned distal to said detection zone.
a control zone that may immobilize unbound conjugated gold nanoparticle (GNP) probe

11. The method of claim 10 wherein said membrane comprises a nitrocellulose membrane.

12. The method of claim 1 wherein said RNA transcript biomarker comprises at least one RNA transcript biomarker encoded by at least one nucleotide sequence selected from the group consisting of: SEQ ID NO. 1-444, and 657-865.

13. A lateral flow assay for the early detection of RNA transcript biomarkers comprising:
a bodily fluid sample having a host RNA transcript biomarker from a subject;
a reaction cylinder configured to receive the saliva sample and further configured to generate an amplified sample through an isothermal reverse transcription recombinase polymerase amplification (RT-RPA) reaction wherein said amplified sample comprises a hybrid dsDNA probe coupled with a DNA conjugated reporter probe;
a conjugate pad configured to receive the amplified sample;
a membrane in fluid communication with said conjugate pad and further configured to allow said solution to flow through said membrane via capillary action;
a detection zone containing a plurality of embedded target capture probes configured to bind and immobilize said hybrid dsDNA probe;
a control zone configured to bind and immobilize one or more unbound DNA conjugated reporter probes; and
an absorbent pad positioned distal to said detection zone and said control zone.

14. The lateral flow assay of claim 13 wherein said bodily fluid sample comprises a saliva sample.

15. The lateral flow assay of claim 13 wherein the reagents necessary to produce said isothermal RT-RPA reaction are pre-loaded into said reaction cylinder.

16. The lateral flow assay of claim 13 wherein said membrane comprises a nitrocellulose membrane.

17. The lateral flow assay of claim 13 wherein said hybrid dsDNA probe comprises:
a dsDNA target sequence;
a ssDNA annealing region; and
a ssDNA target capture region.

18. The lateral flow assay of claim 17 wherein said ssDNA annealing region on hybrid dsDNA probe is complementary to a ssDNA annealing region of said DNA conjugated reporter probe, such that the two probes are coupled together in said amplified solution.

19. The lateral flow assay of claim 18 wherein said dsDNA target sequence is coupled with said ssDNA annealing region and said ssDNA target capture region through a linker.

20. The lateral flow assay of claim 19 wherein said linker comprises a tri-carbon chain spacer (C₃) linker.

21. The lateral flow assay of claim 13 wherein said DNA conjugated reporter probe comprises a conjugated gold nanoparticle (GNP) probe.

22. The lateral flow assay of claim 21 wherein said conjugated GNP probe comprises a GNP coupled to said ssDNA annealing region through a thiol, PEG₁₈, and PolyA construct.

23. The lateral flow assay of any of claims 13 and 17 wherein said target capture probes comprise a target capture probe having an immobilized streptavidin base tetramer coupled with a biotin-TEG linker that may further be coupled with said ssDNA target capture probe sequence that is complementary to said target capture region on said hybrid dsDNA probe.

24. The lateral flow assay of claim 13 wherein said host RNA transcript biomarker comprises at least one RNA transcript biomarker encoded by at least one nucleotide sequence selected from the group consisting of: SEQ ID NO. 1-444, and 657-865.

25. A antibody-based lateral flow assay for the early detection of RNA transcript biomarkers comprising:
a bodily fluid sample having a host RNA transcript biomarker from a subject;
a reaction cylinder configured to receive the saliva sample and further configured to generate an amplified sample through an isothermal reverse transcription recombinase polymerase amplification (RT-RPA) reaction wherein said amplified sample comprises a hybrid dsDNA probe coupled with an antibody conjugated reporter probe;
a conjugate pad configured to receive the amplified sample;
a membrane in fluid communication with said conjugate pad and further configured to allow said amplified sample to flow through said membrane via capillary action;
a detection zone containing a plurality of embedded antibody target capture probes configured to bind and immobilize said hybrid dsDNA probe;
a control zone containing a plurality of embedded antibody target capture probes configured to bind and immobilize said hybrid dsDNA probe;
a capture zone having an antibody configured to bind and immobilize one or more antibody DNA conjugated reporter probes.

26. The antibody-based lateral flow assay of claim 25 wherein said bodily fluid sample comprises a saliva sample.

27. The antibody-based lateral flow assay of claim 25 wherein the reagents necessary to produce said isothermal RT-RPA reaction are pre-loaded into said reaction cylinder.

28. The antibody-based lateral flow assay of claim 25 wherein said membrane comprises a nitrocellulose membrane.

29. The antibody-based lateral flow assay of claim 25 wherein said hybrid dsDNA probe comprises:
a dsDNA target sequence;
a 5′ forward ssDNA oligo; and
a 5′ reverse ssDNA oligo.

30. The antibody-based lateral flow assay of claim 29 wherein said 5′ forward ssDNA oligo comprises a 5′ FITC forward oligo.

31. The antibody-based lateral flow assay of claim 25 wherein said 5′ reverse ssDNA oligo comprises a 5′ DIG reverse oligo, or a 5′ Biotin reverse oligo.

32. The antibody-based lateral flow assay of claim 30 wherein said conjugated reporter probe comprises a gold nanoparticle (GNP) coupled with an antibody forming an antibody conjugated reporter probe.

33. The antibody-based lateral flow assay of claim 32 wherein said antibody comprises an anti-FITC antibody.

34. The antibody-based lateral flow assay of claims 30 and 33 wherein said FITC antibody binds to said 5′ FITC forward oligo of said hybrid dsDNA probe.

35. The antibody-based lateral flow assay of claim 25 wherein said target capture probe of said detection zone comprises an anti-DIG antibody.

36. The antibody-based lateral flow assay of claims 31 and 35 wherein said anti-DIG antibody binds to the 5′ DIG reverse oligo of said hybrid dsDNA probe.

37. The antibody-based lateral flow assay of claims 25 and 31 wherein said target capture probe of said control zone comprises a target capture probe having an immobilized streptavidin base tetramer coupled with a biotin-TEG linker that may further be coupled with said 5′ Biotin reverse oligo.

38. The antibody-based lateral flow assay of claim 30 wherein said target capture probe of said detection zone comprises an anti-rabbit antibody.

39. The antibody-based lateral flow assay of claim 25 wherein said host RNA transcript biomarker comprises at least one RNA transcript biomarker encoded by at least one nucleotide sequence selected from the group consisting of: SEQ ID NO. 1-444, and 657-865.

40. A method of early-pathogen detection comprising the step of:
collecting a bodily fluid sample from a first subject;
extracting host-derived biomarkers of infection and a pathogen biomarkers from said bodily fluid sample;
quantifying said host-derived biomarkers of infection and a pathogen biomarkers through PCR, real time PCR (RT-PCR), or quantitative real-time polymerase chain reaction (qRT-PCR);
establishing a time-course of the levels of host-derived biomarkers of infection and optionally correlating said host-derived biomarkers of infection with said levels of pathogen biomarkers in said bodily fluid sample;
optionally repeating the four above steps at different time-points;
collecting a bodily fluid sample from a second subject containing a host-derived biomarker of infection;
detecting one or more host-derived biomarkers of infection that correlate to infection with said pathogen.

41. The method of claim 40 wherein said bodily fluid sample comprises a saliva sample.

42. The method of claim 41 wherein said host-derived biomarkers of infection comprise host-derived RNA biomarkers of infection.

43. The method of claim 42 wherein said pathogen biomarkers comprises pathogen biomarkers selected from the group consisting of: viral pathogen biomarkers, bacterial pathogen biomarkers, and pathogen fungal biomarkers.

44. The method of claim 43 wherein said viral pathogen biomarkers comprise viral pathogen biomarkers from novel coronavirus SARS-CoV-2.

45. The method of claim 40 wherein said viral pathogen biomarkers from novel coronavirus SARS-CoV-2 comprises one or more biomarkers that may be amplified in a PCR reaction by the nucleotide primers according to SEQ ID NOs. 469-480.

46. The method of claim 40 wherein said host-derived biomarker of infection comprises host-derived RNA biomarkers of infection and further comprising the step of converting said host-derived RNA biomarkers of infection into a hybrid double stranded DNA (dsDNA) probe through an isothermal reverse transcription recombinase polymerase amplification (RT-RPA) reaction.

47. The method of claim 1 wherein said step of detecting comprises the method of claims 1-12.

48. A method of detecting an infection in a subject in need thereof, comprising the step of detecting at least one host-derived RNA biomarker of infection from a biological sample provided by said subject, wherein said at least one host-derived RNA biomarker of infection is selected from the group consisting of: a host-derived RNA biomarker of infection encoded by the nucleotide sequence according to SEQ ID NOs. 1-444, and 657-865.

49. The method of claim 48 wherein said step of detecting comprises the method of claims 1-12.

50. The method of claim 48 wherein said step of detecting comprises the step of detecting said host-derived RNA biomarker of infection comprises detecting a host-derived RNA biomarker of infection using PCR, RT-PCR, or qRT-PCR.

51. A lateral flow assay configured to detect at least one host-derived RNA biomarker from a biological sample provided by a subject, wherein said at least one host-derived RNA biomarker is selected from the group consisting of: a host-derived RNA biomarker encoded by the nucleotide sequence according to SEQ ID NOs. 1-444, and 657-865.

52. An assay configured to detect at least one host-derived RNA biomarker from a biological sample provided by a subject, wherein said at least one host-derived RNA biomarker is selected from the group consisting of: a host-derived RNA biomarker encoded by the nucleotide sequence according to SEQ ID NOs. 1-444, and 657-865, wherein said assay is a PCR assay, RT-PCR assay, or qRT-PCR assay.

53. A microarray assay configured to detect least one host-derived RNA biomarker from a biological sample provided by a subject, wherein said at least one host-derived RNA biomarker is selected from the group consisting of: a host-derived RNA biomarker encoded by the nucleotide sequence according to SEQ ID NOs. 1-444, and 657-865.

54. A lateral flow assay configured to detect at least one host-derived RNA biomarker indicative for a viral infection from a biological sample provided by a subject, wherein said at least one host-derived RNA biomarker indicative for a viral infection is selected from the group consisting of: IFIT2, ICAM1, ERG1, IFIH1, ISG15, CFB, CXCL10, DDX58, and IRAK2.

55. An assay configured to detect at least one host-derived RNA biomarker indicative for a viral infection from a biological sample provided by a subject, wherein said at least one host-derived RNA biomarker indicative for a viral infection is selected from the group consisting of IFIT2, ICAM1, ERG1, IFIH1, ISG15, CFB, CXCL10, DDX58, and IRAK2, wherein said assay is a PCR assay, RT-PCR assay, or qRT-PCR assay.

55. A microarray assay configured to detect least one host-derived RNA biomarker indicative for a viral infection from a biological sample provided by a subject, wherein said at least one host-derived RNA biomarker indicative for a viral infection is selected from the group consisting of: IFIT2, ICAM1, ERG1, IFIH1, ISG15, CFB, CXCL10, DDX58, and IRAK2.

56. A method of detecting a viral infection in a subject in need thereof, comprising detecting least one host-derived RNA biomarker indicative in a biological sample provided by a subject, wherein said at least one host-derived RNA biomarker indicative for a viral infection is selected from the group consisting of IFIT2, ICAM1, ERG1, IFIH1, ISG15, CFB, CXCL10, DDX58, and IRAK2, and said biological sample is saliva.

57. A lateral flow assay configured to detect at least one host-derived RNA biomarker indicative for a SARS-CoV-2 infection from a biological sample provided by a subject, wherein said at least one host-derived RNA biomarker indicative for a viral infection is selected from the group consisting of: MX1, PARP12, IFITM2, CD68, and SERINB3.

58. An assay configured to detect at least one host-derived RNA biomarker indicative for a SARS-CoV-2 infection from a biological sample provided by a subject, wherein said at least one host-derived RNA biomarker indicative for a viral infection is selected from the group consisting of MX1, PARP12, IFITM2, CD68, and SERINB3, wherein said assay is a PCR assay, RT-PCR assay, or qRT-PCR assay.

59. A microarray assay configured to detect least one host-derived RNA biomarker indicative for a SARS-CoV-2 infection from a biological sample provided by a subject, wherein said at least one host-derived RNA biomarker indicative for a viral infection is selected from the group consisting of: MX1, PARP12, IFITM2, CD68, and SERINB3.

60. A method of detecting a SARS-CoV-2 infection in a subject in need thereof, comprising detecting least one host-derived RNA biomarker in a biological sample provided by a subject, wherein said at least one host-derived RNA biomarker is indicative for a SARS-CoV-2 infection is selected from the group consisting of MX1, PARP12, IFITM2, CD68, and SERINB3, and said biological sample is saliva.

61. A lateral flow assay configured to detect at least one host-derived RNA biomarker indicative for an influenza infection from a biological sample provided by a subject, wherein said at least one host-derived RNA biomarker indicative for a viral infection is selected from the group consisting of: PLRG1, MSC, NKG7, NME8, and MMP12.

62. An assay configured to detect at least one host-derived RNA biomarker indicative for an influenza infection from a biological sample provided by a subject, wherein said at least one host-derived RNA biomarker indicative for a viral infection is selected from the group consisting of PLRG1, MSC, NKG7, NME8, and MMP12, wherein said assay is a PCR assay, RT-PCR assay, or qRT-PCR assay.

63. A microarray assay configured to detect least one host-derived RNA biomarker indicative for an influenza infection from a biological sample provided by a subject, wherein said at least one host-derived RNA biomarker indicative for a viral infection is selected from the group consisting of: PLRG1, MSC, NKG7, NME8, and MMP12.

64. A method of detecting an influenza infection in a subject in need thereof, comprising detecting least one host-derived RNA biomarker in a biological sample provided by a subject, wherein said at least one host-derived RNA biomarker is indicative for an influenza infection is selected from the group consisting of PLRG1, MSC, NKG7, NME8, and MMP12, and said biological sample is saliva.

65. The method of any of claims 51-64, wherein said RNA biomarker is selected from the group consisting of: a host-derived RNA biomarker encoded by the nucleotide sequence according to SEQ ID NOs. 1-444, and 657-865.

66. A nucleotide sequence encoding a host-derived RNA biomarker used to detect an infection in a subjected in need thereof, wherein said RNA biomarker is selected from the group consisting of: a nucleotide sequence according to SEQ ID NOs. 1-444, and 657-865.

67. A method of detecting a host-derived RNA biomarker comprising:
collecting a bodily fluid sample potentially containing a host-derived RNA biomarker and optionally a biomarker of a viral, bacterial, or fungal infection;
identifying a transcript of said host-derived RNA biomarker in the sample, and optionally a biomarker of a viral, bacterial, or fungal infection using a method selected from the group consisting of: PCR, RT-PCR, qPCR, transcript sequencing, a lateral flow assay, hybridization assay, microarray, nucleic acid detection assay.

68. The method of claim 67, wherein said bodily fluid sample comprises a saliva sample.

69. The method of claim 68, wherein said host-derived biomarkers of infection comprise host-derived RNA biomarkers of infection.

70. The method of claim 69, wherein said host-derived RNA biomarkers of infection comprises pathogen biomarkers selected from the group consisting of: viral pathogen biomarkers, bacterial pathogen biomarkers, and pathogen fungal biomarkers.

71. The method of claim 70, wherein said viral pathogen biomarkers comprise viral pathogen biomarkers from novel coronavirus SARS-CoV-2.

72. The method of claim 71, wherein said viral pathogen biomarkers from novel coronavirus SARS-CoV-2 comprises one or more biomarkers that may be amplified in a PCR reaction by the nucleotide primers according to SEQ ID NOs. 469-480.

73. The method of claim 69, wherein said host-derived biomarker of infection comprises host-derived RNA biomarkers of infection and further comprising the step of converting said host-derived RNA biomarkers of infection into a hybrid double stranded DNA (dsDNA) probe through an isothermal reverse transcription recombinase polymerase amplification (RT-RPA) reaction.

74. The method of claim 69, wherein said host-derived biomarker of infection comprises a host-derived RNA biomarker of infection is selected from the group consisting of: a host-derived RNA biomarker of infection encoded by the nucleotide sequence according to SEQ ID NOs. 1-444, and 657-865.

75. The method of claim 69, wherein said biomarker of a viral, bacterial, or fungal infection comprises an RNA biomarker of a viral, bacterial, or fungal infection.

The application's sequence listing, which the Patent Office published only in electronic form, follows.

SEQUENCE LISTING (865 sequences)

SEQ ID NO: 1 - DNA, 3669 bp, Homo sapiens
actgtcgcttcagccaggctgcggagcggacggacgcgcctggtgccccggggaggggcgccaccgggggaggaggaggaggagaaggtggagaggaagagacgccccctctgcccgagacctctcaaggccctgacctcaggggccagggcactgacaggacaggagagccaagttcctccacttgggctgcccgaagaggccgcgaccctggagggccctgagcccaccgcaccaggggccccagcaccaccccgggggcctaaagcgacagtctcaggggccatcgcaaggtttccagttgcctagacaacaggcccagggtcagagcaacaatccttccagccacctgcctcaactgctgccccaggcaccagccccagtccctacgcggcagccagcccaggtgacatgccggtgctctccaggccccggccctggcgggggaacacgctgaagcgcacggccgtgctcctggccctcgcggcctatggagcccacaaagtctaccccttggtgcgccagtgcctggccccggccaggggtcttcaggcgcccgccggggagcccacgcaggaggcctccggggtcgcggcggccaaagctggcatgaaccgggtattcctgcagcggctcctgtggctcctgcggctgctgttcccccgggtcctgtgccgggagacggggctgctggccctgcactcggccgccttggtgagccgcaccttcctgtcggtgtatgtggcccgcctggacggaaggctggcccgctgcatcgtccgcaaggacccgcgggcttttggctggcagctgctgcagtggctcctcatcgccctccctgctaccttcgtcaacagtgccatccgttacctggagggccaactggccctgtcgttccgcagccgtctggtggcccacgcctaccgcctctacttctcccagcagacctactaccgggtcagcaacatggacgggcggcttcgcaaccctgaccagtctctgacggaggacgtggtggcctttgcggcctctgtggcccacctctactccaacctgaccaagccactcctggacgtggctgtgacttcctacaccctgcttcgggcggcccgctcccgtggagccggcacagcctggccctcggccatcgccggcctcgtggtgttcctcacggccaacgtgctgcgggccttctcgcccaagttcggggagctggtggcagaggaggcgcggcggaagggggagctgcgctacatgcactcgcgtgtggtggccaactcggaggagatcgccttctatgggggccatgaggtggagctggccctgctacagcgctcctaccaggacctggcctcgcagatcaacctcatccttctggaacgcctgtggtatgttatgctggagcagttcctcatgaagtatgtgtggagcgcctcgggcctgctcatggtggctgtccccatcatcactgccactggctactcagagtcagatgcagaggccgtgaagaaggcagccttggaaaagaaggaggaggagctggtgagcgagcgcacagaagccttcactattgcccgcaacctcctgacagcggctgcagatgccattgagcggatcatgtcgtcgtacaaggaggtgacggagctggctggctacacagcccgggtgcacgagatgttccaggtatttgaagatgttcagcgctgtcacttcaagaggcccagggagctagaggacgctcaggcggggtctgggaccataggccggtctggtgtccgtgtggagggccccctgaagatccgaggccaggtggtggatgtggaacaggggatcatctgcgagaacatccccatcgtcacgccctcaggagaggtggtggtggccagcctcaacatcagggtggaggaaggcatgcatctgctcatcacaggccccaatggctgcggcaagagctccctgttccggatcctgggtgggctctggcccacgtacggtggtgtgctctacaagcccccaccccagcgcatgttctacatcccgcagaggccctacatgtctgtgggctccctgcgtgaccaggtgatctacccggactcagtggaggacatgcaaaggaagggctactcggagcaggacctggaagccatcctggacgtcgtgcacctgcaccacatcctgcagcgggagggaggttgggaggctatgtgtgactggaaggacgtcctgtcgggtggcgagaagcagagaatcggcatggcccgcatgttctaccacaggcccaagtacgccctcctggatgaatgcaccagcgccgtgagcatcgacgtggaaggcaagatcttccaggcggccaaggacgcgggcattgccctgctctccatcacccaccggccctccctgtggaaataccacacacacttgctacagttcgatggggagggcggctggaagttcgagaagctggactcagctgcccgcctgagcctgacggaggagaagcagcggctggagcagcagctggcgggcattcccaagatgcagcggcgcctccaggagctctgccagatcctgggcgaggccgtggccccagcgcatgtgccggcacctagcccgcaaggccctggtggcctccagggtgcctccacctgacacaaccgtccccggcccctgccccgcccccaagctcggatcacatgaaggagacagcagcacccacccatgcacgcaccccgcccctgcatgcctggcccctcctcctagaaaacccttcccgccctcgggaaagtagatgtggagggtggcgccctgcgtaaccctcgccctgtccctcccactccctgggggcgctgttccacagtgactgggccctgtccagggcagtgagtcctctactttgctccgtggaggaagctggggtacaaggggcccagtgctggccacacagcagcgcagccgagccccaggagcccgtcaggccacagcccctggcactgcaggtggcctccctccagagactcgagtccccatgattccctcctcgtcagtctctcaaagaccccatggtccatcccctgagggtggtcagccaaggctcccgttccgtgggatgccataaaagccgcccagtgggacccacagtcacacagagcgcctcacctgcatcctctcccccacaagagccccaaagatcccacgggagaggggagagggacgcacagcactgcctgccaagcgagaatgcaggccccgccccctcggcccctcaccacctctttctacagcctaatttattggattccctattcgtagccatctccgtggccaatgtgactaccgtgccagcagcgggggcggcccagcctctgagtcccgtggggccccggctcccaccggtgccaaacccagcccctgcggccgtcaccccgccagcctacactgccagccgccaccggggcacacgggcctctgcttgccagccaggagtgcggacaccatgttcccagctcagtgccaaagaggggtcaccagggggagctgtctgcggagccagcgcctgcccgagagagaccccaccgccaccgtgtgcctttcccgggccctcagccctcgggccgggcaccacccccagtccccccagtaaaagcctccactggcaaatgcagtccttcc

SEQ ID NO: 2 - DNA, 1830 bp, Homo sapiens
agtctgcactggagctgcctggtgaccagaagtttggagtccgctgacgtcgccgcccagatggcctccaggctgaccctgctgaccctcctgctgctgctgctggctggggatagagcctcctcaaatccaaatgctaccagctccagctcccaggatccagagagtttgcaagacagaggcgaagggaaggtcgcaacaacagttatctccaagatgctattcgttgaacccatcctggaggtttccagcttgccgacaaccaactcaacaaccaattcagccaccaaaataacagctaataccactgatgaacccaccacacaacccaccacagagcccaccacccaacccaccatccaacccacccaaccaactacccagctcccaacagattctcctacccagcccactactgggtccttctgcccaggacctgttactctctgctctgacttggagagtcattcaacagaggccgtgttgggggatgctttggtagatttctccctgaagctctaccacgccttctcagcaatgaagaaggtggagaccaacatggccttttccccattcagcatcgccagcctccttacccaggtcctgctcggggctggggagaacaccaaaacaaacctggagagcatcctctcttaccccaaggacttcacctgtgtccaccaggccctgaagggcttcacgaccaaaggtgtcacctcagtctctcagatcttccacagcccagacctggccataagggacacctttgtgaatgcctctcggaccctgtacagcagcagccccagagtcctaagcaacaacagtgacgccaacttggagctcatcaacacctgggtggccaagaacaccaacaacaagatcagccggctgctagacagtctgccctccgatacccgccttgtcctcctcaatgctatctacctgagtgccaagtggaagacaacatttgatcccaagaaaaccagaatggaaccctttcacttcaaaaactcagttataaaagtgcccatgatgaatagcaagaagtaccctgtggcccatttcattgaccaaactttgaaagccaaggtggggcagctgcagctctcccacaatctgagtttggtgatcctggtaccccagaacctgaaacatcgtcttgaagacatggaacaggctctcagcccttctgttttcaaggccatcatggagaaactggagatgtccaagttccagcccactctcctaacactaccccgcatcaaagtgacgaccagccaggatatgctctcaatcatggagaaattggaattcttcgatttttcttatgaccttaacctgtgtgggctgacagaggacccagatcttcaggtttctgcgatgcagcaccagacagtgctggaactgacagagactggggtggaggcggctgcagcctccgccatctctgtggcccgcaccctgctggtctttgaagtgcagcagcccttcctcttcgtgctctgggaccagcagcacaagttccctgtcttcatggggcgagtatatgaccccagggcctgagacctgcaggatcaggttagggcgagcgctacctctccagcctcagctctcagttgcagccctgctgctgcctgcctggacttggcccctgccacctcctgcctcaggtgtccgctatccaccaaaagggctccctgagggtctgggcaagggacctgcttctattagcccttctccatggccctgccatgctctccaaaccactttttgcagctttctctagttcaagttcaccagactctataaataaaacctgacagaccatga

SEQ ID NO: 3 - DNA, 2610 bp, Homo sapiens
ggctctctacctctcgccgcccctagggaggacaccatgggcccactgatggttcttttttgcctgctgttcctgtacccaggtctggcagactcggctccctcctgccctcagaacgtgaatatctcgggtggcaccttcaccctcagccatggctgggctcctgggagccttctcacctactcctgcccccagggcctgtacccatccccagcatcacggctgtgcaagagcagcggacagtggcagaccccaggagccacccggtctctgtctaaggcggtctgcaaacctgtgcgctgtccagcccctgtctcctttgagaatggcatttataccccacggctggggtcctatcccgtgggtggcaatgtgagcttcgagtgtgaggatggcttcatattgcggggctcgcctgtgcgtcagtgtcgccccaacggcatgtgggatggagaaacagctgtgtgtgataatggggctggccactgccccaacccaggcatttcactgggcgcagtgcggacaggcttccgctttggtcatggggacaaggtccgctatcgctgctcctcgaatcttgtgctcacggggtcttcggagcgggagtgccagggcaacggggtctggagtggaacggagcccatctgccgccaaccctactcttatgacttccctgaggacgtggcccctgccctgggcacttccttctcccacatgcttggggccaccaatcccacccagaagacaaaggaaagcctgggccgtaaaatccaaatccagcgctctggtcatctgaacctctacctgctcctggactgttcgcagagtgtgtcggaaaatgactttctcatcttcaaggagagcgcctccctcatggtggacaggatcttcagctttgagatcaatgtgagcgttgccattatcacctttgcctcagagcccaaagtcctcatgtctgtcctgaacgacaactcccgggatatgactgaggtgatcagcagcctggaaaatgccaactataaagatcatgaaaatggaactgggactaacacctatgcggccttaaacagtgtctatctcatgatgaacaaccaaatgcgactcctcggcatggaaacgatggcctggcaggaaatccgacatgccatcatccttctgacagatggaaagtccaatatgggtggctctcccaagacagctgttgaccatatcagagagatcctgaacatcaaccagaagaggaatgactatctggacatctatgccatcggggtgggcaagctggatgtggactggagagaactgaatgagctagggtccaagaaggatggtgagaggcatgccttcattctgcaggacacaaaggctctgcaccaggtctttgaacatatgctggatgtctccaagctcacagacaccatctgcggggtggggaacatgtcagcaaacgcctctgaccaggagaggacaccctggcatgtcactattaagcccaagagccaagagacctgccggggggccctcatctccgaccaatgggtcctgacagcagctcattgcttccgcgatggcaacgaccactccctgtggagggtcaatgtgggagaccccaaatcccagtggggcaaagaattccttattgagaaggcggtgatctccccagggtttgatgtctttgccaaaaagaaccagggaatcctggagttctatggtgatgacatagctctgctgaagctggcccagaaagtaaagatgtccacccatgccaggcccatctgccttccctgcacgatggaggccaatctggctctgcggagacctcaaggcagcacctgtagggaccatgagaatgaactgctgaacaaacagagtgttcctgctcattttgtcgccttgaatgggagcaaactgaacattaaccttaagatgggagtggagtggacaagctgtgccgaggttgtctcccaagaaaaaaccatgttccccaacttgacagatgtcagggaggtggtgacagaccagttcctatgcagtgggacccaggaggatgagagtccctgcaagggagaatctgggggagcagttttccttgagcggagattcaggttttttcaggtgggtctggtgagctggggtctttacaacccctgccttggctctgctgacaaaaactcccgcaaaagggcccctcgtagcaaggtcccgccgccacgagactttcacatcaatctcttccgcatgcagccctggctgaggcagcacctgggggatgtcctgaattttttacccctctagccatggccactgagccctctgctgccctgccagaatctgccgcccctccatcttctacctctgaatggccacccttagaccctgtgatccatcctctctcctagctgagtaaatccgggtctctaggatgccagaggcagcgcacacaagctgggaaatcctcagggctcctaccagcaggactgcctcgctgccccacctcccgctccttggcctgtccccagattccttccctggttgacttgactcatgcttgtttcactttcacatggaatttcccagttatgaaattaataaaaatcaatggtttccaca

SEQ ID NO: 4 - DNA, 5231 bp, Homo sapiens
actcctccccatcctctccctctgtccctctgtccctctgaccctgcactgtcccagcaccatgggacccacctcaggtcccagcctgctgctcctgctactaacccacctccccctggctctggggagtcccatgtactctatcatcacccccaacatcttgcggctggagagcgaggagaccatggtgctggaggcccacgacgcgcaaggggatgttccagtcactgttactgtccacgacttcccaggcaaaaaactagtgctgtccagtgagaagactgtgctgacccctgccaccaaccacatgggcaacgtcaccttcacgatcccagccaacagggagttcaagtcagaaaaggggcgcaacaagttcgtgaccgtgcaggccaccttcgggacccaagtggtggagaaggtggtgctggtcagcctgcagagcgggtacctcttcatccagacagacaagaccatctacacccctggctccacagttctctatcggatcttcaccgtcaaccacaagctgctacccgtgggccggacggtcatggtcaacattgagaacccggaaggcatcccggtcaagcaggactccttgtcttctcagaaccagcttggcgtcttgcccttgtcttgggacattccggaactcgtcaacatgggccagtggaagatccgagcctactatgaaaactcaccacagcaggtcttctccactgagtttgaggtgaaggagtacgtgctgcccagtttcgaggtcatagtggagcctacagagaaattctactacatctataacgagaagggcctggaggtcaccatcaccgccaggttcctctacgggaagaaagtggagggaactgcctttgtcatcttcgggatccaggatggcgaacagaggatttccctgcctgaatccctcaagcgcattccgattgaggatggctcgggggaggttgtgctgagccggaaggtactgctggacggggtgcagaacccccgagcagaagacctggtggggaagtctttgtacgtgtctgccaccgtcatcttgcactcaggcagtgacatggtgcaggcagagcgcagcgggatccccatcgtgacctctccctaccagatccacttcaccaagacacccaagtacttcaaaccaggaatgccctttgacctcatggtgttcgtgacgaaccctgatggctctccagcctaccgagtccccgtggcagtccagggcgaggacactgtgcagtctctaacccagggagatggcgtggccaaactcagcatcaacacacaccccagccagaagcccttgagcatcacggtgcgcacgaagaagcaggagctctcggaggcagagcaggctaccaggaccatgcaggctctgccctacagcaccgtgggcaactccaacaattacctgcatctctcagtgctacgtacagagctcagacccggggagaccctcaacgtcaacttcctcctgcgaatggaccgcgcccacgaggccaagatccgctactacacctacctgatcatgaacaagggcaggctgttgaaggcgggacgccaggtgcgagagcccggccaggacctggtggtgctgcccctgtccatcaccaccgacttcatcccttccttccgcctggtggcgtactacacgctgatcggtgccagcggccagagggaggtggtggccgactccgtgtgggtggacgtcaaggactcctgcgtgggctcgctggtggtaaaaagcggccagtcagaagaccggcagcctgtacctgggcagcagatgaccctgaagatagagggtgaccacggggcccgggtggtactggtggccgtggacaagggcgtgttcgtgctgaataagaagaacaaactgacgcagagtaagatctgggacgtggtggagaaggcagacatcggctgcaccccgggcagtgggaaggattacgccggtgtcttctccgacgcagggctgaccttcacgagcagcagtggccagcagaccgcccagagggcagaacttcagtgcccgcagccagccgcccgccgacgccgttccgtgcagctcacggagaagcgaatggacaaagtcggcaagtaccccaaggagctgcgcaagtgctgcgaggacggcatgcgggagaaccccatgaggttctcgtgccagcgccggacccgtttcatctccctgggcgaggcgtgcaagaaggtcttcctggactgctgcaactacatcacagagctgcggcggcagcacgcgcgggccagccacctgggcctggccaggagtaacctggatgaggacatcattgcagaagagaacatcgtttcccgaagtgagttcccagagagctggctgtggaacgttgaggacttgaaagagccaccgaaaaatggaatctctacgaagctcatgaatatatttttgaaagactccatcaccacgtgggagattctggctgtgagcatgtcggacaagaaagggatctgtgtggcagaccccttcgaggtcacagtaatgcaggacttcttcatcgacctgcggctaccctactctgttgttcgaaacgagcaggtggaaatccgagccgttctctacaattaccggcagaaccaagagctcaaggtgagggtggaactactccacaatccagccttctgcagcctggccaccaccaagaggcgtcaccagcagaccgtaaccatcccccccaagtcctcgttgtccgttccatatgtcatcgtgccgctaaagaccggcctgcaggaagtggaagtcaaggctgctgtctaccatcatttcatcagtgacggtgtcaggaagtccctgaaggtcgtgccggaaggaatcagaatgaacaaaactgtggctgttcgcaccctggatccagaacgcctgggccgtgaaggagtgcagaaagaggacatcccacctgcagacctcagtgaccaagtcccggacaccgagtctgagaccagaattctcctgcaagggaccccagtggcccagatgacagaggatgccgtcgacgcggaacggctgaagcacctcattgtgaccccctcgggctgcggggaacagaacatgatcggcatgacgcccacggtcatcgctgtgcattacctggatgaaacggagcagtgggagaagttcggcctagagaagcggcagggggccttggagctcatcaagaaggggtacacccagcagctggccttcagacaacccagctctgcctttgcggccttcgtgaaacgggcacccagcacctggctgaccgcctacgtggtcaaggtcttctctctggctgtcaacctcatcgccatcgactcccaagtcctctgcggggctgttaaatggctgatcctggagaagcagaagcccgacggggtcttccaggaggatgcgcccgtgatacaccaagaaatgattggtggattacggaacaacaacgagaaagacatggccctcacggcctttgttctcatctcgctgcaggaggctaaagatatttgcgaggagcaggtcaacagcctgccaggcagcatcactaaagcaggagacttccttgaagccaactacatgaacctacagagatcctacactgtggccattgctggctatgctctggcccagatgggcaggctgaaggggcctcttcttaacaaatttctgaccacagccaaagataagaaccgctgggaggaccctggtaagcagctctacaacgtggaggccacatcctatgccctcttggccctactgcagctaaaagactttgactttgtgcctcccgtcgtgcgttggctcaatgaacagagatactacggtggtggctatggctctacccaggccaccttcatggtgttccaagccttggctcaataccaaaaggacgcccctgaccaccaggaactgaaccttgatgtgtccctccaactgcccagccgcagctccaagatcacccaccgtatccactgggaatctgccagcctcctgcgatcagaagagaccaaggaaaatgagggtttcacagtcacagctgaaggaaaaggccaaggcaccttgtcggtggtgacaatgtaccatgctaaggccaaagatcaactcacctgtaataaattcgacctcaaggtcaccataaaaccagcaccggaaacagaaaagaggcctcaggatgccaagaacactatgatccttgagatctgtaccaggtaccggggagaccaggatgccactatgtctatattggacatatccatgatgactggctttgctccagacacagatgacctgaagcagctggccaatggtgttgacagatacatctccaagtatgagctggacaaagccttctccgataggaacaccctcatcatctacctggacaaggtctcacactctgaggatgactgtctagctttcaaagttcaccaatactttaatgtagagcttatccagcctggagcagtcaaggtctacgcctattacaacctggaggaaagctgtacccggttctaccatccggaaaaggaggatggaaagctgaacaagctctgccgtgatgaactgtgccgctgtgctgaggagaattgcttcatacaaaagtcggatgacaaggtcaccctggaagaacggctggacaaggcctgtgagccaggagtggactatgtgtacaagacccgactggtcaaggttcagctgtccaatgactttgacgagtacatcatggccattgagcagaccatcaagtcaggctcggatgaggtgcaggttggacagcagcgcacgttcatcagccccatcaagtgcagagaagccctgaagctggaggagaagaaacactacctcatgtggggtctctcctccgatttctggggagagaagcccaacctcagctacatcatcgggaaggacacttgggtggagcactggcccgaggaggacgaatgccaagacgaagagaaccagaaacaatgccaggacctcggcgccttcaccgagagcatggttgtctttgggtgccccaactgaccacacccccattcccccactccagataaagcttcagttatatctcacgtgtctggagttctttgccaagagggagaggctgaaatccccagccgcctcacctgcagctcagctccatcctacttgaaacctcacctgttcccaccgcattttctcctggcgttcgcctgctagtgtg

SEQ ID NO: 5 - DNA, 1780 bp, Homo sapiens
acaggcccttagagcatcgccaggtgcagagctccacagctctctttcccaaggagtaatcagagggtgagaacgtggagcctggtggacaggtgaaagcactgggatctttctgcccagaaaggggaaagttgcacatttatatcctagagggaagcgacagcagtgcttctccctgtgctgaggtacaggagccatgtggctagaaatcctcctcacttcagtgctgggctttgccatctactggttcatctcccgggacaaagaggaaactttgccacttgaagatgggtggtgggggccaggcacgaggtccgcagccagggaggacgacagcatccgccctttcaaggtggaaacgtcagatgaggagatccacgacttacaccagaggatcgataagttccgtttcaccccacctttggaggacagctgcttccactatggcttcaactccaactacctgaagaaagtcatctcctactggcggaatgaatttgactggaagaagcaggtggagattctcaacagataccctcacttcaagactaagattgaagggctggacatccacttcatccacgtgaagcccccccagctgcccgcaggccataccccgaagcccttgctgatggtgcacggctggcccggctctttctacgagttttataagatcatcccactcctgactgaccccaagaaccatggcctgagcgatgagcacgtttttgaagtcatctgcccttccatccctggctatggcttctcagaggcatcctccaagaaggggttcaactcggtggccaccgccaggatcttttacaagctgatgctgcggctgggcttccaggaattctacattcaaggaggggactgggggtccctgatctgcactaatatggcccagctggtgcccagccacgtgaaaggcctgcacttgaacatggctttggttttaagcaacttctctaccctgaccctcctcctgggacagcgtttcgggaggtttcttggcctcactgagagggatgtggagctgctgtaccccgtcaaggagaaggtattctacagcctgatgagggagagcggctacatgcacatccagtgcaccaagcctgacaccgtaggctctgctctgaatgactctcctgtgggtctggctgcctatattctagagaagttttccacctggaccaatacggaattccgatacctggaggatggaggcctggaaaggaagttctccctggacgacctgctgaccaacgtcatgctctactggacaacaggcaccatcatctcctcccagcgcttctacaaggagaacctgggacagggctggatgacccagaagcatgagcggatgaaggtctatgtgcccactggcttctctgccttcccttttgagctattgcacacgcctgaaaagtgggtgaggttcaagtacccaaagctcatctcctattcctacatggttcgtgggggccactttgcggcctttgaggagccggagctgctcgcccaggacatccgcaagttcctgtcggtgctggagcggcaatgacccacccctctccccccgcctgccacctccccccacaagtgccctccaggcttttcttggggaagataccccttttctgaggaatgagtttgcctccgtcccctgcccatgctgggagcccacgctcaccccctcacccctccaagctcactccccaacccccaactccgtgtggtaagcaacatggctttgatgataaacgactttactctaaaa

SEQ ID NO: 6 - DNA, 2916 bp, Homo sapiens
agcctgtggccgctcccggctcggagtgtgatctaagcaggttgcgtaccttcctcaggtgactccggccacagcccattgtccgcggccaccggcggagtttagccgcagacctcgaagcgccccggggtccttcccgaacggcagcggctgcggcgggtccatggagaagggccctgtgcgggcaccggcggagaagccgcggggcgccaggtgcagcaatgggttccccgagcgggatccgccgcggcccgggcccagcaggccggcggagaagcccccgcggcccgaggccaagagcgcgcagcccgcggacggctggaagggcgagcggccccgcagcgaggaggataacgagctgaacctccctaacctggcagccgcctactcgtccatcctgagctcgctgggcgagaacccccagcggcaagggctgctcaagacgccctggagggcggcctcggccatgcagttcttcaccaagggctaccaggagaccatctcagatgtcctaaacgatgctatatttgatgaagatcatgatgagatggtgattgtgaaggacatagacatgttttccatgtgtgagcatcacttggttccatttgttggaaaggtccatattggttatcttcctaacaagcaagtccttggcctcagcaaacttgcgaggattgtagaaatctatagtagaagactacaagttcaggagcgccttacaaaacaaattgctgtagcaatcacggaagccttgcggcctgctggagtcggggtagtggttgaagcaacacacatgtgtatggtaatgcgaggtgtacagaaaatgaacagcaaaactgtgaccagcacaatgttgggtgtgttccgggaggatccaaagactcgggaagagttcctgactctcattaggagctgagcttcattcagtgtgtgtgcgttggttgccgatcgtactgccagtagcattgtctgtctgtccggtcttgtttgtacattccattttcaattgttacagatgtgaactttattccttgtcactaattatatttaaaattatttctaggaagtcaaataaatataataaagggttgagccctctactttcttcttgccacctttttgtggcaatattaaagtgaactgctaatagtgtaagtacgtgcacaaaaccactgccagataaccagaggggcctgggaagggagaagaattagtgtatttttttcaaatagtacagtaatttgcctcataagcataggagcattgggaatgagagggaactgtgcccagtatactgttttttttcttcctccaataaaagtggtgtagtgccgaaagtgctaaaatatttagtgcggtattgctctgtgaattcaagttcaacagacttcactttggtcatgtttattaaaccaccagtgacatttaaaaatatatttttagcagtcgtaatgttagtcaccaagggaaggtggtggaatgtctatgtttttgattttactgtgagttaaaaaggcacatttctaccttctattgtttttaaattcaagaatagggaattagttcctggtgttgtttacgagtgtattctcgtgtcaacatacagggatttagacatttaactctctgtgccttgataagaatatcatttagagtgtagatacttttgcctttttaaaaaagccattattttatgagacttagtactcacactgcaaataactagtcagctcagttttaactttataggtttattgagtttcctttgtgtgatccatgtagatgcctcaaaatgtttcttcttcttcttttttttaatcttataagatatttttctaagtatttccagaaacatttgagagtgcccatcattttcaggtctgcagaaccatagcttccacgcacctgaacgagcacagaatgaactgacggtggaagacattatgagctgtgtccaacgttttaaccaaagcgtatcgtaccaacgatctgtgaaaatgcactggaagcttctggtcccggtttcctttgtggtctatgtgggtcttgtcctcattgtaactccgtatagatggtataggtattttaatcctggaagctgttgccttattaatgattatcttaaaatttcctccattggggcagcgtgggccaaattaaaacaaacaaaaccgcaactcctccacagaaacacaaacacagttattccatgaagtttagtatttggttgacatagtgctcttcaaattcatcccattaccctaaaagtaataactttgatgcttgctttaactttagtcccatctctgccactttgatgctatttgggttatgatggggcaagatggcagaggtattgggtttttttgtttttttccattcctctctacttctgtttcctagctttttctttctggagtttaagtacagtgatggttggcttgagtacctttttaaatctagcccagtataaacattagcctgcttaatatttagacatttataggtagaattctgagcactcaactcatgtttggcattttaaagtaaaaacaagtgtgacttcgaggaccaaagaaattgtcagctatacatttatctttatgaactcatttatattcctttttaatgactcgttgttctaacatttcctagaagtgttcttataaaggtctaatgtatccacaggctgttgtcttattagtaaatgcaaagtaatgactttgtctgttttactctagtctttagtacttcaaaattaccttttcatatccatgatcttgagtccatttgggggatttttaagaatttgatgtatttcaatacactgttcaaaattaaattgtttaattttatgtatgagtatgtatgttcctgaaggtggtcctatttaaattattaaactattgtaacttt

SEQ ID NO: 7 - DNA, 4485 bp, Homo sapiens
gggccggaggggcggggtgagaaggctgcgcgcgggtaaaggggccgcctcgagcgcggtccgagcgttcagcggacgcgcgcggcctcgatctctggactcgtcacctgcccctccccctcccgccgccgtcacccaggaaaccggccgcaatcgccggccgacctgaagctggtttcatggcagcctcaaagaaggcagttttggggccattggtgggggcggtggaccagggcaccagttcgacgcgctttttggttttcaattcaaaaacagctgaactacttagtcatcatcaagtagaaataaaacaagagttcccaagagaaggatgggtggaacaggaccctaaggaaattctacattctgtctatgagtgtatagagaaaacatgtgagaaacttggacagctcaatattgatatttccaacataaaagctattggtgtcagcaaccagagggaaaccactgtagtctgggacaagataactggagagcctctctacaatgctgtggtgtggcttgatctaagaacccagtctaccgttgagagtcttagtaaaagaattccaggaaataataactttgtcaagtccaagacaggccttccacttagcacttacttcagtgcagtgaaacttcgttggctccttgacaatgtgagaaaagttcaaaaggccgttgaagaaaaacgagctctttttgggactattgattcatggcttatttggagtttgacaggaggagtcaatggaggtgtccactgtacagatgtaacaaatgcaagtaggactatgcttttcaacattcattctttggaatgggataaacaactctgcgaattttttggaattccaatggaaattcttccaaatgtccggagttcttctgagatctatggcctaatgaaagctggggccttggaaggtgtgccaatatctgggtgtttaggggaccagtctgctgcattggtgggacaaatgtgcttccagattggacaagccaaaaatacgtatggaacaggatgtttcttactatgtaatacaggccataagtgtgtattttctgatcatggccttctcaccacagtggcttacaaacttggcagagacaaaccagtatattatgctttggaaggttctgtagctatagctggtgctgttattcgctggctaagagacaatcttggaattataaagacctcagaagaaattgaaaaacttgctaaagaagtaggtacttcttatggctgctacttcgtcccagcattttcggggttatatgcaccttattgggagcccagcgcaagagggataatctgtggactcactcagttcaccaataaatgccatattgcttttgctgcattagaagctgtttgtttccaaactcgagagattttggatgccatgaatcgagactgtggaattccactcagtcatttgcaggtagatggaggaatgaccagcaacaaaattcttatgcagctacaagcagacattctgtatataccagtagtgaagccctcaatgcccgaaaccactgcactgggtgcggctatggcggcaggggctgcagaaggagtcggcgtatggagtctcgaacccgaggatttgtctgccgtcacgatggagcggtttgaacctcagattaatgcggaggaaagtgaaattcgttattctacatggaagaaagctgtgatgaagtcaatgggttgggttacaactcaatctccagaaagtggtattccataaaacctaccaactcatggattcccaagatgtgagctttttacataatgaaagaacccagcaattctgtctcttaatgcaatgacactattcatagactttgattttatttataagccacttgctgcatgaccctccaagtagacctgtggcttaaaataaagaaaatgcagcaaaaagaatgctatagaaatatttggtggttttttttttttttaaacatccacagttaaggttgggccagctacctttggggctgaccccctccattgccataacatcctgctccattccctctaagatgtaggaagaattcggatccttaccattggaatcttccatcgaacatactcaaacacttttggaccaggatttgagtctctgcatgacatatacttgattaaaaggttattactaacctgttaaaaatcagcagctctttgcttttaacagacaccctaaaagtcttcttttctacatagttgaagacagcaacatcttcactgaatgtttgaatagaaacctctactaaattattaaaatagacatttagtgttctcacagcttggatatttttctgaaaagttatttgccaaaactgaaatccttcagatgttttccatggtcccactaattataatgactttctgtctggatcttataggaaaagatactttcttttttcttccatctttcctttttatattttttactttgtatgtataacatacatgcctatatattttatacactgagggtagcccatttataaattaagagcacattatattcagaaggttctaacagggctggtcttaagtgaaccactgtgtatataaatatgttggaaaacagctgtatacatttttgggcaacggttatgcataatatttaccaggagaatttttttcttaacaagccaacatttaaaatttatgttttatgtcaataaaagaaaatatactttattgtgacttcaactatatttcttatcccttacatttttatttaattgtcttagcttaaaaaaagaagaaactgtggaatactacagtaaatattgttttcaaacacaagcaataattcaaatagttatttttcttttgaattaattttagacatattttggatcctattgaggggataagaggatgtcaaaaaagttaaatacctaagtagaaaaaaatatagaaataaagccaagaatctctttcagttcaaatgttatcaattgttaataagaaattgctatctgggatgacagaattacctctgcttagtatctcattataactgaaagaaggtttatcattacaaataccttccaatgaaaccaagaatttctcaaaatatttaatgtcacatattataagaagttacctaatcctgcttcttaacatcaatttttaaaaatatcttaaaattactttgttttgtagtaaacagtgaagaaaagattgcctcctaattatttttttcaatgagtgctgaatgggaaaacatttatatcttactataaaaggttctgttttgtttggaatcaatggtagctttattgactgttctgattgtgctgtttctaatttattgaatctgctaggttttattgatgcagccaccacttaagtgacataaatattatagaaaggtactgtgaaatgatcactttgtggcaggggtacttttaaacataaatgtttctacaaaagtaggttgagttcattgtaaataattgtgaaagccactgttcaaataattttaagattacattaatttttctataaattggaagatttataaatgtttgaaattgtacacattgatatttaatgacaaatttacttaaaataaattgaccccttgttcttacttgcatttctcatttacagactagaacttagttgaaagttaaattaagaaagatgtttcagaggccgggcacggtggctgacgcctgtaatcccagcactttgggaggccgaggtgggcagatcacctgaggtcaggagttcgggactagcctaaccgacatggagaaaccctatctctactaaaaaaaaaaaaagatgtttcaggacatgtgaaacttggctgttagcgcttgatagggcacactctgaagagttaaccaacagccaaagaagtaatttctgtaatgatgaacactttaatcattctattagaagaaactacactgtcccatctcagcatttgcaaaaaataatgttggtaaggtcagcagccattatcaacagggccttgcatggctaactttgaccaccatttttctctcaacctgataggcaacacctcaatcctttgttctccaactaatcagtaaaataagtaatgcatctctgcttctgtaatgatatcttagaatttttagtatgtttcttttgaagtgcccaaagcccaattctttgggatatcttttgggtatctggtatcatgtgggagtgaagaaagaaagtttttggagaaaccaacaaatgaaagctgtgatagcacagaagctaatggcattgacagtggagtaggtagtatttaatctgtagtgtttacaacatagtagatagaagtacaaaaatttttttaactataactctttaatagcttgttttatctagtaatatttaaataatgaagtttccttgatcctttgcttttgcaacctaacaactttaataataagttcacacaataaacaaattagtagaaaaaaaaaaaaaaa

SEQ ID NO: 8 - DNA, 2967 bp, Homo sapiens
gagctcctctgctactcagagttgcaacctcagcctcgctatggctcccagcagcccccggcccgcgctgcccgcactcctggtcctgctcggggctctgttcccaggacctggcaatgcccagacatctgtgtccccctcaaaagtcatcctgccccggggaggctccgtgctggtgacatgcagcacctcctgtgaccagcccaagttgttgggcatagagaccccgttgcctaaaaaggagttgctcctgcctgggaacaaccggaaggtgtatgaactgagcaatgtgcaagaagatagccaaccaatgtgctattcaaactgccctgatgggcagtcaacagctaaaaccttcctcaccgtgtactggactccagaacgggtggaactggcacccctcccctcttggcagccagtgggcaagaaccttaccctacgctgccaggtggagggtggggcaccccgggccaacctcaccgtggtgctgctccgtggggagaaggagctgaaacgggagccagctgtgggggagcccgctgaggtcacgaccacggtgctggtgaggagagatcaccatggagccaatttctcgtgccgcactgaactggacctgcggccccaagggctggagctgtttgagaacacctcggccccctaccagctccagacctttgtcctgccagcgactcccccacaacttgtcagcccccgggtcctagaggtggacacgcaggggaccgtggtctgttccctggacgggctgttcccagtctcggaggcccaggtccacctggcactgggggaccagaggttgaaccccacagtcacctatggcaacgactccttctcggccaaggcctcagtcagtgtgaccgcagaggacgagggcacccagcggctgacgtgtgcagtaatactggggaaccagagccaggagacactgcagacagtgaccatctacagctttccggcgcccaacgtgattctgacgaagccagaggtctcagaagggaccgaggtgacagtgaagtgtgaggcccaccctagagccaaggtgacgctgaatggggttccagcccagccactgggcccgagggcccagctcctgctgaaggccaccccagaggacaacgggcgcagcttctcctgctctgcaaccctggaggtggccggccagcttatacacaagaaccagacccgggagcttcgtgtcctgtatggcccccgactggacgagagggattgtccgggaaactggacgtggccagaaaattcccagcagactccaatgtgccaggcttgggggaacccattgcccgagctcaagtgtctaaaggatggcactttcccactgcccatcggggaatcagtgactgtcactcgagatcttgagggcacctacctctgtcgggccaggagcactcaaggggaggtcacccgcaaggtgaccgtgaatgtgctctccccccggtatgagattgtcatcatcactgtggtagcagccgcagtcataatgggcactgcaggcctcagcacgtacctctataaccgccagcggaagatcaagaaatacagactacaacaggcccaaaaagggacccccatgaaaccgaacacacaagccacgcctccctgaacctatcccgggacagggcctcttcctcggccttcccatattggtggcagtggtgccacactgaacagagtggaagacatatgccatgcagctacacctaccggccctgggacgccggaggacagggcattgtcctcagtcagatacaacagcatttggggccatggtacctgcacacctaaaacactaggccacgcatctgatctgtagtcacatgactaagccaagaggaaggagcaagactcaagacatgattgatggatgttaaagtctagcctgatgagaggggaagtggtgggggagacatagccccaccatgaggacatacaactgggaaatactgaaacttgctgcctattgggtatgctgaggccccacagacttacagaagaagtggccctccatagacatgtgtagcatcaaaacacaaaggcccacacttcctgacggatgccagcttgggcactgctgtctactgaccccaacccttgatgatatgtatttattcatttgttattttaccagctatttattgagtgtcttttatgtaggctaaatgaacataggtctctggcctcacggagctcccagtcctaatcacattcaaggtcaccaggtacagttgtacaggttgtacactgcaggagagtgcctggcaaaaagatcaaatggggctgggacttctcattggccaacctgcctttccccagaaggagtgatttttctatcggcacaaaagcactatatggactggtaatggttacaggttcagagattacccagtgaggccttattcctcccttccccccaaaactgacacctttgttagccacctccccacccacatacatttctgccagtgttcacaatgacactcagcggtcatgtctggacatgagtgcccagggaatatgcccaagctatgccttgtcctcttgtcctgtttgcatttcactgggagcttgcactatgcagctccagtttcctgcagtgatcagggtcctgcaagcagtggggaagggggccaaggtattggaggactccctcccagctttggaagcctcatccgcgtgtgtgtgtgtgtgtatgtgtagacaagctctcgctctgtcacccaggctggagtgcagtggtgcaatcatggttcactgcagtcttgaccttttgggctcaagtgatcctcccacctcagcctcctgagtagctgggaccataggctcacaacaccacacctggcaaatttgattttttttttttttccagagacggggtctcgcaacattgcccagacttcctttgtgttagttaataaagctttctcaactgcc

SEQ ID NO: 9 - DNA, 3506 bp, Homo sapiens
ctaccagaagccagacagctggctcgagcctctcctgctcagcaccatggctaagacccctagtgaccatctgctgtccaccctggaggagctggtgccctatgacttcgagaagttcaagttcaagctgcagaacaccagtgtgcagaaggagcactccaggatcccccggagccagatccagagagccaggccggtgaagatggccactctgctggtcacctactatggggaagagtacgccgtgcagctcaccctgcaggtcctgcgggccatcaaccagcgcctgctggccgaggagctccacagggcagccattcaggaatattccacacaagaaaacggcacagatgattccgcagcgtccagctccctgggggagaacaagcccaggagcctgaagactccagaccaccccgaggggaacgaggggaacggccctcggccgtacgggggcggagctgccagcctgcggtgcagccagcccgaggccgggagggggctgtcgaggaagcccctgagcaaacgcagagagaaggcctcggagggcctggacgcgcagggcaagcctcggacccggagcccggccctgccgggcgggagaagccccggcccctgcagggcgctagaggggggccaggccgaggtccggctgcgcagaaacgccagctccgcggggaggctgcaggggctggcggggggcgccccggggcagaaggagtgcaggcccttcgaagtgtacctgccctcgggaaagatgcgacctagaagccttgaggtcaccatttctacaggggagaaggcgcccgcaaatccagaaattctcctgactctagaggaaaagacagctgcgaatctggactcggcaacagaaccccgggcaaggcccactccggatggaggggcatctgcggacctgaaggaaggccctggaaatccagaacattcggtcaccggaaggccaccagacacggctgcgagtccccgctgccacgcccaggaaggagacccagttgacggtacctgtgtgcgtgattcctgcagcttccccgaggcagtttctgggcacccccaggcctcaggcagccgctcacctggctgcccccggtgccaggactcccatgaaaggaagagcccgggaagcctaagcccccagcccctgccacagtgtaagcgccacctgaagcaggtccagctgctcttctgtgaggatcacgatgagcccatctgcctcatctgcagtctgagtcaggagcaccaaggccaccgggtgcgccccattgaggaggtcgccctggaacacaagaagaaaattcagaagcagctggagcatctgaagaagctgagaaaatcaggggaggagcagcgatcctatggggaggagaaggcagtgagctttctgaaacaaactgaagcgctgaagcagcgggtgcagaggaagctggagcaggtgtactacttcctggagcagcaagagcatttctttgtggcctcactggaggacgtgggccagatggttgggcagatcaggaaggcatatgacacccgcgtatcccaggacatcgccctgctcgatgcgctgattggggaactggaggccaaggagtgccagtcagaatgggaacttctgcaggacattggagacatcttgcacagggctaagacagtgcctgtccctgaaaagtggaccactcctcaagagataaaacaaaagatccaactcctccaccagaagtcagagtttgtggagaagagcacaaagtacttctcagaaaccctgcgttcagaaatggaaatgttcaatgttccggagctgattggcgctcaggcacatgctgttaatgtgattctggatgcagaaaccgcttaccccaacctcatcttctctgatgatctgaagagtgttagacttggaaacaagtgggagaggctgcctgatggcccgcaaagatttgacagctgtatcattgttctgggctctccgagtttcctctctggccgccgttactgggaggtggaggttggagacaagacagcatggatcctgggagcctgcaagacatccataagcaggaaagggaacatgactctgtcgccagagaatggctactgggtggtgataatgatgaaggaaaatgagtaccaggcgtccagcgttcccccgacccgcctgctaataaaggagcctcccaagcgtgtgggcatcttcgtggactacagagttggaagcatctccttttacaatgtgacagccagatcccacatctatacattcgccagctgctctttctctgggccccttcaacctatcttcagccctgggacacgtgatggagggaagaacacagctcctctgactatctgtccagtgggtggtcaggggcctgactgaatgcccaacactgcatctctcttcctgcttctggccttgtatcttgcattcacactcaatagtcacggaatgccgactaggtgctagctgctatgggaaatgcaaaaataacaaaatagttactgtgcccacggagcctacccgattatagcagaggtaagttaggaacgaacatgttagtcaatccgggtgaagacatgtactgatgacacaccatggatttcagaggaggaagtacggagtcgttgcataatccgcccctggtgggtggcactctcaggtgctcctgaacagaagatttggccctcattttccctcagaaccccacggcaaggatatatgtccccttgttctctctgcttctgtcttgaggatatgggaagcctagagaaacgcaagcagactggattgggatagaagtatttgtgtacctggattaatgaactatgattttttttttttttttttgagaccaaatcttgctctgtggcccaggctggagtgcagtggcacgatctcagctcactgcaacctccacctcccaggttcaagcgattctcctgcctcagcctcctgagcagctgggattacaggtgcgtgccaccacaccaggctggttttcttgtatttttagtagagacgggggtttcaccatgttagccaggctggtctcgaactcctgacctcaggtgatccacccgcctcagcctcccaaagtgctgggattacaggcatgagccactgtgcccggcctatgattcttttttttttttttttttgagacaaagttttgctcttgtcacccaggctggagtgcagtggtgcaatcttggctcgcaacctccgcctcccaggttcaagagattctcctgcctcagcctccgaagtagctgggattacaggcgcccgccaccatgcccggctaattttttgcatttttagtagacatgaggtttcatcatgttggccaggccggtctcaaactcctgacctcaggtgatgcacccacctcagcctcccaaagtgcagggattacaggcatgagccaccatgccgggccatgattcttaagagaattgactgggcctcatgaataaaaaaattagaaaatctg

SEQ ID NO: 10 - DNA, 2192 bp, Homo sapiens
gcagacttagccgtgcattgcaggcatggaggattaatcagtgacaggaagctgcgtctctcggagcggtgaccagctgtggtcaggagagcctcagcagggccagccccaggagtctttcccgattcttgctcactgctcacccacctgctgctgccatgaggcaccttggggccttcctcttccttctgggggtcctgggggccctcactgagatgtgtgaaataccagagatggacagccatctggtagagaagttgggccagcacctcttaccttggatggaccggctttccctggagcacttgaaccccagcatctatgtgggcctacgcctctccagtctgcaggctgggaccaaggaagacctctacctgcacagcctcaagcttggttaccagcagtgcctcctagggtctgccttcagcgaggatgacggtgactgccagggcaagccttccatgggccagctggccctctacctgctcgctctcagagccaactgtgagtttgtcaggggccacaagggggacaggctggtctcacagctcaaatggttcctggaggatgagaagagagccattgggcatgatcacaagggccacccccacactagctactaccagtatggcctgggcattctggccctgtgtctccaccagaagcgggtccatgacagcgtggtggacaaacttctgtatgctgtggaacctttccaccagggccaccattctgtggacacagcagccatggcaggcttggcattcacctgtctgaagcgctcaaacttcaaccctggtcggagacaacggatcaccatggccatcagaacagtgcgagaggagatcttgaaggcccagacccccgagggccactttgggaatgtctacagcaccccattggcattacagttcctcatgacttcccccatgcgtggggcagaactgggaacagcatgtctcaaggcgagggttgctttgctggccagtctgcaggatggagccttccagaatgctctcatgatttcccagctgctgcccgttctgaaccacaagacctacattgatctgatcttcccagactgtctggcaccacgagtcatgttggaaccagctgctgagaccattcctcagacccaagagatcatcagtgtcacgctgcaggtgcttagtctcttgccgccgtacagacagtccatctctgttctggccgggtccaccgtggaagatgtcctgaagaaggcccatgagttaggaggattcacatatgaaacacaggcctccttgtcaggcccctacttaacctccgtgatggggaaagcggccggagaaagggagttctggcagcttctccgagaccccaacaccccactgttgcaaggtattgctgactacagacccaaggatggagaaaccattgagctgaggctggttagctggtagcccctgagctccctcatcccagcagcctcgcacactccctaggcttctaccctccctcctgatgtccctggaacaggaactcgcctgaccctgctgccacctcctgtgcactttgagcaatgccccctgggatcaccccagccacaagcccttcgagggccctataccatggcccaccttggagcagagagccaagcatcttccctgggaagtctttctggccaagtctggccagcctggccctgcaggtctcccatgaaggccaccccatggtctgatgggcatgaagcatctcagactccttggcaaaaaacggagtccgcaggccgcaggtgttgtgaagaccactcgttctgtggttggggtcctgcaagaaggcctcctcagcccgggggctatggccctgaccccagctctccactctgctgttagagtggcagctccgagctggttgtggcacagtagctggggagacctcagcagggctgctcagtgcctgcctctgacaaaattaaagcattgatggcctgtggacctgctacagtggcctggtgcctcatactcctcaggtgcaggggcagggacaagagaagggggaagtaaccccatcagggaggagtggagggtgcctgagccgccatgtgggcattgggggagtgatgggaatgccagcagtgatgacattgactactgactgagcacccactactatgactgagcactcactcgctagatactatcttgaactgc

SEQ ID NO: 11 - DNA, 1517 bp, Homo sapiens
acacaacttggggcccctctcctctccagcccttctcctgtgtgcctgcctcctgccgccgccaccatgaccacctccatccgccagttcacctcctccagctccatcaagggctcctccggcctggggggcggctcgtcccgcacctcctgccggctgtctggcggcctgggtgccggctcctgcaggctgggatctgctggcggcctgggcagcaccctcgggggtagcagctactccagctgctacagctttggctctggtggtggctatggcagcagctttgggggtgttgatgggctgctggctggaggtgagaaggccaccatgcagaacctcaatgaccgcctggcctcctacctggacaaggtgcgtgccctggaggaggccaacactgagctggaggtgaagatccgtgactggtaccagaggcaggccccggggcccgcccgtgactacagccagtactacaggacaattgaggagctgcagaacaagatcctcacagccaccgtggacaatgccaacatcctgctacagattgacaatgcccgtctggctgctgatgacttccgcaccaagtttgagacagagcaggccctgcgcctgagtgtggaggccgacatcaatggcctgcgcagggtgctggatgagctgaccctggccagagccgacctggagatgcagattgagaacctcaaggaggagctggcctacctgaagaagaaccacgaggaggagatgaacgccctgcgaggccaggtgggtggtgagatcaatgtggagatggacgctgccccaggcgtggacctgagccgcatcctcaacgagatgcgtgaccagtatgagaagatggcagagaagaaccgcaaggatgccgaggattggttcttcagcaagacagaggaactgaaccgcgaggtggccaccaacagtgagctggtgcagagtggcaagagtgagatctcggagctccggcgcaccatgcaggccttggagatagagctgcagtcccagctcagcatgaaagcatccctggagggcaacctggcggagacagagaaccgctactgcgtgcagctgtcccagatccaggggctgattggcagcgtggaggagcagctggcccagcttcgctgcgagatggagcagcagaaccaggaatacaaaatcctgctggatgtgaagacgcggctggagcaggagattgccacctaccgccgcctgctggagggagaggatgcccacctgactcagtacaagaaagaaccggtgaccacccgtcaggtgcgtaccattgtggaagaggtccaggatggcaaggtcatctcctcccgcgagcaggtccaccagaccacccgctgaggactcagctaccccggccggccacccaggaggcagggaggcagccgccccatctgccccacagtctccggcctctccagcctcagccccctgcttcagtcccttccccatgcttccttgcctgatgacaataaagcttgttgactcagcta

SEQ ID NO: 12 - DNA, 1098 bp, Homo sapiens
agtaggctctcggctcctggtcccactgctgctcagcccagtggcctcacaggacaccagcttcccaggaggcgtctgacacagtatgatgatgaagatcccatggggcagcatcccagtactgatgttgctcctgctcctgggcctaatcgatatctcccaggcccagctcagctgcaccgggcccccagccatccctggcatcccgggtatccctgggacacctggccccgatggccaacctgggaccccagggataaaaggagagaaagggcttccagggctggctggagaccatggtgagttcggagagaagggagacccagggattcctgggaatccaggaaaagtcggccccaagggccccatgggccctaaaggtggcccaggggcccctggagccccaggccccaaaggtgaatcgggagactacaaggccacccagaaaatcgccttctctgccacaagaaccatcaacgtccccctgcgccgggaccagaccatccgcttcgaccacgtgatcaccaacatgaacaacaattatgagccccgcagtggcaagttcacctgcaaggtgcccggtctctactacttcacctaccacgccagctctcgagggaacctgtgcgtgaacctcatgcgtggccgggagcgtgcacagaaggtggtcaccttctgtgactatgcctacaacaccttccaggtcaccaccggtggcatggtcctcaagctggagcagggggagaacgtcttcctgcaggccaccgacaagaactcactactgggcatggagggtgccaacagcatcttttccgggttcctgctctttccagatatggaggcctgacctgtgggctgcttcacatccaccccggctccccctgccagcaacgctcactctacccccaacaccaccccttgcccaaccaatgcacacagtagggcttggtgaatgctgctgagtgaatgagtaaataaactcttcaaggccaagggacagtggtctaattcaactctgtgtcccagcacctggcacaccagaagtgccatgctcagaaatgttggttacatgaatgaatgaaccatgaatgaatgaaa

SEQ ID NO: 13 - DNA, 1333 bp, Homo sapiens
aatatcttgcatgttacagatttcactgctcccaccagcttggagacaacatgtggttcttgacaactctgctcctttgggttccagttgatgggcaagtggacaccacaaaggcagtgatcactttgcagcctccatgggtcagcgtgttccaagaggaaaccgtaaccttgcactgtgaggtgctccatctgcctgggagcagctctacacagtggtttctcaatggcacagccactcagacctcgacccccagctacagaatcacctctgccagtgtcaatgacagtggtgaatacaggtgccagagaggtctctcagggcgaagtgaccccatacagctggaaatccacagaggctggctactactgcaggtctccagcagagtcttcacggaaggagaacctctggccttgaggtgtcatgcgtggaaggataagctggtgtacaatgtgctttactatcgaaatggcaaagcctttaagtttttccactggaattctaacctcaccattctgaaaaccaacataagtcacaatggcacctaccattgctcaggcatgggaaagcatcgctacacatcagcaggaatatctgtcactgtgaaagagctatttccagctccagtgctgaatgcatctgtgacatccccactcctggaggggaatctggtcaccctgagctgtgaaacaaagttgctcttgcagaggcctggtttgcagctttacttctccttctacatgggcagcaagaccctgcgaggcaggaacacatcctctgaataccaaatactaactgctagaagagaagactctgggttatactggtgcgaggctgccacagaggatggaaatgtccttaagcgcagccctgagttggagcttcaagtgcttggcctccagttaccaactcctgtctggtttcatgtccttttctatctggcagtgggaataatgtttttagtgaacactgttctctgggtgacaatacgtaaagaactgaaaagaaagaaaaagtgggatttagaaatctctttggattctggtcatgagaagaaggtaatttccagccttcaagaagacagacatttagaagaagagctgaaatgtcaggaacaaaaagaagaacagctgcaggaaggggtgcaccggaaggagccccagggggccacgtagcagcggctcagtgggtggccatcgatctggaccgtcccctgcccacttgctccccgtgagcactgcgtacaaacatccaaaagttcaacaacaccagaactgtgtgtctcatggtatgtaactcttaaagcaaataaatgaactgacttcaactggga

SEQ ID NO: 14 - DNA, 1642 bp, Homo sapiens
acaaactttcagagacagcagagcacacaagcttctaggacaagagccaggaagaaaccaccggaaggaaccatctcactgtgtgtaaacatgacttccaagctggccgtggctctcttggcagccttcctgatttctgcagctctgtgtgaaggtgcagttttgccaaggagtgctaaagaacttagatgtcagtgcataaagacatactccaaacctttccaccccaaatttatcaaagaactgagagtgattgagagtggaccacactgcgccaacacagaaattattgtaaagctttctgatggaagagagctctgtctggaccccaaggaaaactgggtgcagagggttgtggagaagtttttgaagagggctgagaattcataaaaaaattcattctctgtggtatccaagaatcagtgaagatgccagtgaaacttcaagcaaatctacttcaacacttcatgtattgtgtgggtctgttgtagggttgccagatgcaatacaagattcctggttaaatttgaatttcagtaaacaatgaatagtttttcattgtaccatgaaatatccagaacatacttatatgtaaagtattatttatttgaatctacaaaaaacaacaaataatttttaaatataaggattttcctagatattgcacgggagaatatacaaatagcaaaattgaggccaagggccaagagaatatccgaactttaatttcaggaattgaatgggtttgctagaatgtgatatttgaagcatcacataaaaatgatgggacaataaattttgccataaagtcaaatttagctggaaatcctggatttttttctgttaaatctggcaaccctagtctgctagccaggatccacaagtccttgttccactgtgccttggtttctcctttatttctaagtggaaaaagtattagccaccatcttacctcacagtgatgttgtgaggacatgtggaagcactttaagttttttcatcataacataaattattttcaagtgtaacttattaacctatttattatttatgtatttatttaagcatcaaatatttgtgcaagaatttggaaaaatagaagatgaatcattgattgaatagttataaagatgttatagtaaatttattttattttagatattaaatgatgttttattagataaatttcaatcagggtttttagattaaacaaacaaacaattgggtacccagttaaattttcatttcagataaacaacaaataattttttagtataagtacattattgtttatctgaaattttaattgaactaacaatcctagtttgatactcccagtcttgtcattgccagctgtgttggtagtgctgtgttgaattacggaataatgagttagaactattaaaacagccaaaactccacagtcaatattagtaatttcttgctggttgaaacttgtttattatgtacaaatagattcttataatattatttaaatgactgcatttttaaatacaaggctttatatttttaactttaagatgtttttatgtgctctccaaattttttttactgtttctgattgtatggaaatataaaagtaaatatgaaacatttaaaatataatttgttgtcaaagtaa

SEQ ID NO: 15 - DNA, 2974 bp, Homo sapiens
gtgtgcgtgatggagaaaattgggcaccagggctgctcccgagattctcagatctgatttccacgcttgctaccaaaatagtctgggcaggccacttttggaagtaggcgttatctagtgagcaggcggccgctttcgatttcgctttcccctaaatggctgagcttctcgccagcgcaggatcagcctgttcctgggactttccgagagccccgccctcgttccctcccccagccgccagtaggggaggactcggcggtacccggagcttcaggccccaccggggcgcggagagtcccaggcccggccgggaccgggacggcgtccgagtgccaatggctagctctaggtgtcccgctccccgcgggtgccgctgcctccccggagcttctctcgcatggctggggacagtactgctacttctcgccgactgggtgctgctccggaccgcgctgccccgcatattctccctgctggtgcccaccgcgctgccactgctccgggtctgggcggtgggcctgagccgctgggccgtgctctggctgggggcctgcggggtcctcagggcaacggttggctccaagagcgaaaacgcaggtgcccagggctggctggctgctttgaagccattagctgcggcactgggcttggccctgccgggacttgccttgttccgagagctgatctcatggggagcccccgggtccgcggatagcaccaggctactgcactggggaagtcaccctaccgccttcgttgtcagttatgcagcggcactgcccgcagcagccctgtggcacaaactcgggagcctctgggtgcccggcggtcagggcggctctggaaaccctgtgcgtcggcttctaggctgcctgggctcggagacgcgccgcctctcgctgttcctggtcctggtggtcctctcctctcttggggagatggccattccattctttacgggccgcctcactgactggattctacaagatggctcagccgataccttcactcgaaacttaactctcatgtccattctcaccatagccagtgcagtgctggagttcgtgggtgacgggatctataacaacaccatgggccacgtgcacagccacttgcagggagaggtgtttggggctgtcctgcgccaggagacggagtttttccaacagaaccagacaggtaacatcatgtctcgggtaacagaggacacgtccaccctgagtgattctctgagtgagaatctgagcttatttctgtggtacctggtgcgaggcctatgtctcttggggatcatgctctggggatcagtgtccctcaccatggtcaccctgatcaccctgcctctgcttttccttctgcccaagaaggtgggaaaatggtaccagttgctggaagtgcaggtgcgggaatctctggcaaagtccagccaggtggccattgaggctctgtcggccatgcctacagttcgaagctttgccaacgaggagggcgaagcccagaagtttagggaaaagctgcaagaaataaagacactcaaccagaaggaggctgtggcctatgcagtcaactcctggaccactagtatttcaggtatgctgctgaaagtgggaatcctctacattggtgggcagctggtgaccagtggggctgtaagcagtgggaaccttgtcacatttgttctctaccagatgcagttcacccaggctgtggaggtactgctctccatctaccccagagtacagaaggctgtgggctcctcagagaaaatatttgagtacctggaccgcacccctcgctgcccacccagtggtctgttgactcccttacacttggagggccttgtccagttccaagatgtctcctttgcctacccaaaccgcccagatgtcttagtgctacaggggctgacattcaccctacgccctggcgaggtgacggcgctggtgggacccaatgggtctgggaagagcacagtggctgccctgctgcagaatctgtaccagcccaccgggggacagctgctgttggatgggaagccccttccccaatatgagcaccgctacctgcacaggcaggtggctgcagtgggacaagagccacaggtatttggaagaagtcttcaagaaaatattgcctatggcctgacccagaagccaactatggaggaaatcacagctgctgcagtaaagtctggggcccatagtttcatctctggactccctcagggctatgacacagaggtagacgaggctgggagccagctgtcagggggtcagcgacaggcagtggcgttggcccgagcattgatccggaaaccgtgtgtacttatcctggatgatgccaccagtgccctggatgcaaacagccagttacaggtggagcagctcctgtacgaaagccctgagcggtactcccgctcagtgcttctcatcacccagcacctcagcctggtggagcaggctgaccacatcctctttctggaaggaggcgctatccgggaggggggaacccaccagcagctcatggagaaaaaggggtgctactgggccatggtgcaggctcctgcagatgctccagaatgaaagccttctcagacctgcgcactccatctccctcccttttcttctctctgtggtggagaaccacagctgcagagtaggcagctgcctccaggatgagttacttgaaatttgccttgagtgtgttacctcctttccaagctcctcgtgataatgcagacttcctggagtacaaacacaggatttgtaattccttactgtaacggagtttagagccagggctgatgctttggtgtggccagcactctgaaactgagaaatgttcagaatgtacggaaagatgatcagctattttcaacataactgaaggcatatgctggcccataaacaccctgtaggttcttgatatttataataaaattggtgttttgtaaaaaaaaaaaaaaaaaaaaaaa

SEQ ID NO: 16 - DNA, 1678 bp, Homo sapiens
agcagacgctccctcagcaaggacagcagaggaccagctaagagggagagaagcaactacagaccccccctgaaaacaaccctcagacgccacatcccctgacaagctgccaggcaggttctcttcctctcacatactgacccacggctccaccctctctcccctggaaaggacaccatgagcactgaaagcatgatccgggacgtggagctggccgaggaggcgctccccaagaagacaggggggccccagggctccaggcggtgcttgttcctcagcctcttctccttcctgatcgtggcaggcgccaccacgctcttctgcctgctgcactttggagtgatcggcccccagagggaagagttccccagggacctctctctaatcagccctctggcccaggcagtcagatcatcttctcgaaccccgagtgacaagcctgtagcccatgttgtagcaaaccctcaagctgaggggcagctccagtggctgaaccgccgggccaatgccctcctggccaatggcgtggagctgagagataaccagctggtggtgccatcagagggcctgtacctcatctactcccaggtcctcttcaagggccaaggctgcccctccacccatgtgctcctcacccacaccatcagccgcatcgccgtctcctaccagaccaaggtcaacctcctctctgccatcaagagcccctgccagagggagaccccagagggggctgaggccaagccctggtatgagcccatctatctgggaggggtcttccagctggagaagggtgaccgactcagcgctgagatcaatcggcccgactatctcgactttgccgagtctgggcaggtctactttgggatcattgccctgtgaggaggacgaacatccaaccttcccaaacgcctcccctgccccaatccctttattaccccctccttcagacaccctcaacctcttctggctcaaaaagagaattgggggcttagggtcggaacccaagcttagaactttaagcaacaagaccaccacttcgaaacctgggattcaggaatgtgtggcctgcacagtgaagtgctggcaaccactaagaattcaaactggggcctccagaactcactggggcctacagctttgatccctgacatctggaatctggagaccagggagcctttggttctggccagaatgctgcaggacttgagaagacctcacctagaaattgacacaagtggaccttaggccttcctctctccagatgtttccagacttccttgagacacggagcccagccctccccatggagccagctccctctatttatgtttgcacttgtgattatttattatttatttattatttatttatttacagatgaatgtatttatttgggagaccggggtatcctgggggacccaatgtaggagctgccttggctcagacatgttttccgtgaaaacggagctgaacaataggctgttcccatgtagccccctggcctctgtgccttcttttgattatgttttttaaaatatttatctgattaagttgtctaaacaatgctgatttggtgaccaactgtcactcattgctgagcctctgctccccaggggagttgtgtctgtaatcgccctactattcagtggcgagaaataaagtttgcttagaaaagaaa

SEQ ID NO: 17 - DNA, 3156 bp, Homo sapiens
acagctgtgtttggctgcagggccaagagcgctgtcaagaagacccacacgcccccctccagcagctgaattcctgcagctcagcagccgccgccagagcaggacgaaccgccaatcgcaaggcacctctgagaacttcaggatgcagatgtctccagccctcacctgcctagtcctgggcctggcccttgtctttggtgaagggtctgctgtgcaccatcccccatcctacgtggcccacctggcctcagacttcggggtgagggtgtttcagcaggtggcgcaggcctccaaggaccgcaacgtggttttctcaccctatggggtggcctcggtgttggccatgctccagctgacaacaggaggagaaacccagcagcagattcaagcagctatgggattcaagattgatgacaagggcatggcccccgccctccggcatctgtacaaggagctcatggggccatggaacaaggatgagatcagcaccacagacgcgatcttcgtccagcgggatctgaagctggtccagggcttcatgccccacttcttcaggctgttccggagcacggtcaagcaagtggacttttcagaggtggagagagccagattcatcatcaatgactgggtgaagacacacacaaaaggtatgatcagcaacttgcttgggaaaggagccgtggaccagctgacacggctggtgctggtgaatgccctctacttcaacggccagtggaagactcccttccccgactccagcacccaccgccgcctcttccacaaatcagacggcagcactgtctctgtgcccatgatggctcagaccaacaagttcaactatactgagttcaccacgcccgatggccattactacgacatcctggaactgccctaccacggggacaccctcagcatgttcattgctgccccttatgaaaaagaggtgcctctctctgccctcaccaacattctgagtgcccagctcatcagccactggaaaggcaacatgaccaggctgccccgcctcctggttctgcccaagttctccctggagactgaagtcgacctcaggaagcccctagagaacctgggaatgaccgacatgttcagacagtttcaggctgacttcacgagtctttcagaccaagagcctctccacgtcgcgcaggcgctgcagaaagtgaagatcgaggtgaacgagagtggcacggtggcctcctcatccacagctgtcatagtctcagcccgcatggcccccgaggagatcatcatggacagacccttcctctttgtggtccggcacaaccccacaggaacagtccttttcatgggccaagtgatggaaccctgaccctggggaaagacgccttcatctgggacaaaactggagatgcatcgggaaagaagaaactccgaagaaaagaattttagtgttaatgactctttctgaaggaagagaagacatttgccttttgttaaaagatggtaaaccagatctgtctccaagaccttggcctctccttggaggacctttaggtcaaactccctagtctccacctgagaccctgggagagaagtttgaagcacaactcccttaaggtctccaaaccagacggtgacgcctgcgggaccatctggggcacctgcttccacccgtctctctgcccactcgggtctgcagacctggttcccactgaggccctttgcaggatggaactacggggcttacaggagcttttgtgtgcctggtagaaactatttctgttccagtcacattgccatcactcttgtactgcctgccaccgcggaggaggctggtgacaggccaaaggccagtggaagaaacaccctttcatctcagagtccactgtggcactggccacccctccccagtacaggggtgctgcaggtggcagagtgaatgtcccccatcatgtggcccaactctcctggcctggccatctccctccccagaaacagtgtgcatgggttattttggagtgtaggtgacttgtttactcattgaagcagatttctgcttccttttatttttataggaatagaggaagaaatgtcagatgcgtgcccagctcttcaccccccaatctcttggtggggaggggtgtacctaaatatttatcatatccttgcccttgagtgcttgttagagagaaagagaactactaaggaaaataatattatttaaactcgctcctagtgtttctttgtggtctgtgtcaccgtatctcaggaagtccagccacttgactggcacacacccctccggacatccagcgtgacggagcccacactgccaccttgtggccgcctgagaccctcgcgccccccgcgcccctctttttccccttgatggaaattgaccatacaatttcatcctccttcaggggatcaaaaggacggagtggggggacagagactcagatgaggacagagtggtttccaatgtgttcaatagatttaggagcagaaatgcaaggggctgcatgacctaccaggacagaactttccccaattacagggtgactcacagccgcattggtgactcacttcaatgtgtcatttccggctgctgtgtgtgagcagtggacacgtgaggggggggtgggtgagagagacaggcagctcggattcaactaccttagataatatttctgaaaacctaccagccagagggtagggcacaaagatggatgtaatgcactttgggaggccaaggcgggaggattgcttgagcccaggagttcaagaccagcctgggcaacataccaagacccccgtctctttaaaaatatatatattttaaatatacttaaatatatatttctaatatctttaaatatatatatatattttaaagaccaatttatgggagaattgcacacagatgtgaaatgaatgtaatctaatagaagcctaatcagcccaccatgttctccactgaaaaatcctctttctttggggtttttctttctttcttttttgattttgcactggacggtgacgtcagccatgtacaggatccacaggggtggtgtcaaatgctattgaaattgtgttgaattgtatgctttttcacttttgataaataaacatgtaaaaatgtttcaaaaaaataataaaataaataaatacgaa

SEQ ID NO: 18 - DNA, 2358 bp, Homo sapiens
gacattcagtgcagtctacctgcagcacagcacactccctttgggcaaggacctgagacccttgtgctaagtcaagaggctcaatgggctgcagaagaactagagaaggaccaagcaaagccatgatatttccatggaaatgtcagagcacccagagggacttatggaacatcttcaagttgtgggggtggacaatgctctgttgtgatttcctggcacatcatggaaccgactgctggacttaccattattctgaaaaacccatgaactggcaaagggctagaagattctgccgagacaattacacagatttagttgccatacaaaacaaggcggaaattgagtatctggagaagactctgcctttcagtcgttcttactactggataggaatccggaagataggaggaatatggacgtgggtgggaaccaacaaatctcttactgaagaagcagagaactggggagatggtgagcccaacaacaagaagaacaaggaggactgcgtggagatctatatcaagagaaacaaagatgcaggcaaatggaacgatgacgcctgccacaaactaaaggcagccctctgttacacagcttcttgccagccctggtcatgcagtggccatggagaatgtgtagaaatcatcaataattacacctgcaactgtgatgtggggtactatgggccccagtgtcagtttgtgattcagtgtgagcctttggaggccccagagctgggtaccatggactgtactcaccctttgggaaacttcagcttcagctcacagtgtgccttcagctgctctgaaggaacaaacttaactgggattgaagaaaccacctgtggaccatttggaaactggtcatctccagaaccaacctgtcaagtgattcagtgtgagcctctatcagcaccagatttggggatcatgaactgtagccatcccctggccagcttcagctttacctctgcatgtaccttcatctgctcagaaggaactgagttaattgggaagaagaaaaccatttgtgaatcatctggaatctggtcaaatcctagtccaatatgtcaaaaattggacaaaagtttctcaatgattaaggagggtgattataaccccctcttcattccagtggcagtcatggttactgcattctctgggttggcatttatcatttggctggcaaggagattaaaaaaaggcaagaaatccaagagaagtatgaatgacccatattaaatcgcccttggtgaaagaaaattcttggaatactaaaaatcatgagatcctttaaatccttccatgaaacgttttgtgtggtggcacctcctacgtcaaacatgaagtgtgtttccttcagtgcatctgggaagatttctacctgaccaacagttccttcagcttccatttcgcccctcatttatccctcaacccccagcccacaggtgtttatacagctcagctttttgtcttttctgaggagaaacaaataagaccataaagggaaaggattcatgtggaatataaagatggctgactttgctctttcttgactcttgttttcagtttcaattcagtgctgtacttgatgacagacacttctaaatgaagtgcaaatttgatacatatgtgaatatggactcagttttcttgcagatcaaatttcacgtcgtcttctgtatactgtggaggtacactcttatagaaagttcaaaaagtctacgctctcctttctttctaactccagtgaagtaatggggtcctgctcaagttgaaagagtcctatttgcactgtagcctcgccgtctgtgaattggaccatcctatttaactggcttcagcctccccaccttcttcagccacctctctttttcagttggctgacttccacacctagcatctcatgagtgccaagcaaaaggagagaagagagaaatagcctgcgctgttttttagtttgggggttttgctgtttccttttatgagacccattcctatttcttatagtcaatgtttcttttatcacgatattattagtaagaaaacatcactgaaatgctagctgcaagtgacatctctttgatgtcatatggaagagttaaaacaggtggagaaattccttgattcacaatgaaatgctctcctttcccctgcccccagaccttttatccacttacctagattctacatattctttaaatttcatctcaggcctccctcaaccccaccacttcttttataactagtcctttactaatccaacccatgatgagctcctcttcctggcttcttactgaaaggttaccctgtaacatgcaattttgcatttgaataaagcctgctttttaagtgttaa

SEQ ID NO: 19 - DNA, 2857 bp, Homo sapiens
ctaaatccagaatcgtttcaattactgtgaggggaattctgaagttctcattaaacacacgaatgtctcaagctttgaaaagagccagatgccaaaggcaagaatcccagggcattgcccacctgggtgtgatcccctgataattgtctaacaaattcagcatgtgtcccctgggcatgaccatctgctgggaaaagttccaggaccctgagacatcttgggattcctgtggtttaggaaagacctttaactaccagctggtagttgtctcagcattcttcaaatagtccggtcttgtttaatattattattattattgttatttaattttattttattgcaactgtacttagagaatagtctggtcttgagaccttttcactgtggtctgttctggtgtacggctcccaccagtgtgaagcagaaggatgactttgctctgttgtcaggacaaccttgaaggaaggagccaaatgtgtggaggtctgtgggaagagagagccacctagcatgtccccactgaaccagtcagcagaaggccttccccaggaggcctccaacagatccctgaatgccacagaaacctcagaggcttgggatcccaggaccctccaggcgctcaagatctcccttgccgtggtcctttccgtcatcacactggccacagtcctctccaatgcctttgtactcaccaccatcttactcaccaggaagctccacacccctgccaactacctgattggctccctggccaccaccgacctcttggtttccatcttggtaatgcccatcagcatcgcctataccatcacccacacctggaactttggccaaatcttgtgtgacatctggctgtcctctgacatcacgtgctgcacagcctccatcctgcatctctgtgtcattgctctggacaggtactgggcaatcacagatgccctggaatacagtaaacgcaggacggctggccacgcggccaccatgatcgccattgtctgggccatctccatctgcatctccatccccccgctcttctggcggcaggccaaggcccaggaggagatgtcggactgtctggtgaacacctctcagatctcctacaccatctactccacctgtggggccttctacattccctcggtgttgctcatcatcctatatggccggatctaccgggctgcccggaaccgcatcctgaatccaccctcactctatgggaagcgcttcaccacggcccacctcatcacaggctctgccgggtcctcgctctgctcgctcaactccagcctccatgaggggcactcgcactcggctggctcccctctctttttcaaccacgtgaaaatcaagcttgctgacagtgccctggaacgcaagaggatttctgctgctcgagaaaggaaagccactaaaatcctgggcatcattctgggggcctttatcatctgctggctgcccttcttcgtggtgtctctggtcctccccatctgccgggactcctgctggatccacccggcgctctttgacttcttcacctggctaggctatttaaactccctcatcaatccaataatctacactgtgtttaatgaagagtttcggcaagcttttcagaaaattgtccctttccggaaggcctcctagtcttattcggtgatgactcttgttatcttttgtgtcctgtaacctcatcgggattgtcttttttttttttaattattttctgagacttggattaattcatggtatcttgagtcttggttcaatcaacagaattgttctttttcctgttgttttcttaacttctgaaagagctgtgggtggtggggggcggggggcaggactgaagatttcactacttagcataatattttctttctttttttttttttttgagacggagtcttgccctctcgccaggctggagtgtagtggcacaatctcagctcactgcaacctccgcatcccgggttcaagagattctgcctcagcctccagagtagctgggactacaaacgtgtgtcaccaggcccagctaatttttgtatttttaataaagacggggtttcatcatgttggccagggtggtctcgatctcttgacctcgtgatccgcccgcctcagcatcccaaagtgctgggattacaggcatgagccactgtgcctggccaacataatgttttcacagttcctctttgttggaagaagtgtgtgacctacaagattcctggttgatacagttcaggtgagaaactgtttgattatagaaaagaccccagactcagagggaaggctctctggtctacctgagatctatatggagcttaaaggagggtgaataagattaatgacctgaattgaaagagaatttggagccaggatgggtctccattctgtgtggcaccttgattggaaaataatatccatgcgtttcttccactgagtctttcttagattaaatctctcccagttgtccgtgaagagaaagacagtatttgcagtgccgatgatatagagtgacttggagagagattcagaagttaggggtagcgggggtaggatggttgggaccagattgactaccctgtacccttccttcttccccaatatgcctgcgccatcttcacattctgaagttgaaacccatgatcacccctttgaggtagattgaccggctttagacgcccaccccccacccaccgcaagctttgagtgggacaccattctgaattttttttctgaatttttttttaacatctctttctcattagagatctgaaaactcattagagatgttgagtcttatcaaataaaaagcatgagacatcatggccaaaaaaaaaaaaaaaaaaaaaaa

SEQ ID NO: 20 - DNA, 4510 bp, Homo sapiens
aattgtcatacgacttgcagtgagcgtcaggagcacgtccaggaactcctcagcagcgcctccttcagctccacagccagacgccctcagacagcaaagcctacccccgcgccgcgccctgcccgccgctgcgatgctcgcccgcgccctgctgctgtgcgcggtcctggcgctcagccatacagcaaatccttgctgttcccacccatgtcaaaaccgaggtgtatgtatgagtgtgggatttgaccagtataagtgcgattgtacccggacaggattctatggagaaaactgctcaacaccggaatttttgacaagaataaaattatttctgaaacccactccaaacacagtgcactacatacttacccacttcaagggattttggaacgttgtgaataacattcccttccttcgaaatgcaattatgagttatgtgttgacatccagatcacatttgattgacagtccaccaacttacaatgctgactatggctacaaaagctgggaagccttctctaacctctcctattatactagagcccttcctcctgtgcctgatgattgcccgactcccttgggtgtcaaaggtaaaaagcagcttcctgattcaaatgagattgtggaaaaattgcttctaagaagaaagttcatccctgatccccagggctcaaacatgatgtttgcattctttgcccagcacttcacgcatcagtttttcaagacagatcataagcgagggccagctttcaccaacgggctgggccatggggtggacttaaatcatatttacggtgaaactctggctagacagcgtaaactgcgccttttcaaggatggaaaaatgaaatatcagataattgatggagagatgtatcctcccacagtcaaagatactcaggcagagatgatctaccctcctcaagtccctgagcatctacggtttgctgtggggcaggaggtctttggtctggtgcctggtctgatgatgtatgccacaatctggctgcgggaacacaacagagtatgcgatgtgcttaaacaggagcatcctgaatggggtgatgagcagttgttccagacaagcaggctaatactgataggagagactattaagattgtgattgaagattatgtgcaacacttgagtggctatcacttcaaactgaaatttgacccagaactacttttcaacaaacaattccagtaccaaaatcgtattgctgctgaatttaacaccctctatcactggcatccccttctgcctgacacctttcaaattcatgaccagaaatacaactatcaacagtttatctacaacaactctatattgctggaacatggaattacccagtttgttgaatcattcaccaggcaaattgctggcagggttgctggtggtaggaatgttccacccgcagtacagaaagtatcacaggcttccattgaccagagcaggcagatgaaataccagtcttttaatgagtaccgcaaacgctttatgctgaagccctatgaatcatttgaagaacttacaggagaaaaggaaatgtctgcagagttggaagcactctatggtgacatcgatgctgtggagctgtatcctgcccttctggtagaaaagcctcggccagatgccatctttggtgaaaccatggtagaagttggagcaccattctccttgaaaggacttatgggtaatgttatatgttctcctgcctactggaagccaagcacttttggtggagaagtgggttttcaaatcatcaacactgcctcaattcagtctctcatctgcaataacgtgaagggctgtccctttacttcattcagtgttccagatccagagctcattaaaacagtcaccatcaatgcaagttcttcccgctccggactagatgatatcaatcccacagtactactaaaagaacgttcgactgaactgtagaagtctaatgatcatatttatttatttatatgaaccatgtctattaatttaattatttaataatatttatattaaactccttatgttacttaacatcttctgtaacagaagtcagtactcctgttgcggagaaaggagtcatacttgtgaagacttttatgtcactactctaaagattttgctgttgctgttaagtttggaaaacagtttttattctgttttataaaccagagagaaatgagttttgacgtctttttacttgaatttcaacttatattataagaacgaaagtaaagatgtttgaatacttaaacactgtcacaagatggcaaaatgctgaaagtttttacactgtcgatgtttccaatgcatcttccatgatgcattagaagtaactaatgtttgaaattttaaagtacttttggttatttttctgtcatcaaacaaaaacaggtatcagtgcattattaaatgaatatttaaattagacattaccagtaatttcatgtctactttttaaaatcagcaatgaaacaataatttgaaatttctaaattcatagggtagaatcacctgtaaaagcttgtttgatttcttaaagttattaaacttgtacatataccaaaaagaagctgtcttggatttaaatctgtaaaatcagtagaaattttactacaattgcttgttaaaatattttataagtgatgttcctttttcaccaagagtataaacctttttagtgtgactgttaaaacttccttttaaatcaaaatgccaaatttattaaggtggtggagccactgcagtgttatcttaaaataagaatattttgttgagatattccagaatttgtttatatggctggtaacatgtaaaatctatatcagcaaaagggtctacctttaaaataagcaataacaaagaagaaaaccaaattattgttcaaatttaggtttaaacttttgaagcaaacttttttttatccttgtgcactgcaggcctggtactcagattttgctatgaggttaatgaagtaccaagctgtgcttgaataatgatatgttttctcagattttctgttgtacagtttaatttagcagtccatatcacattgcaaaagtagcaatgacctcataaaatacctcttcaaaatgcttaaattcatttcacacattaattttatctcagtcttgaagccaattcagtaggtgcattggaatcaagcctggctacctgcatgctgttccttttcttttcttcttttagccattttgctaagagacacagtcttctcatcacttcgtttctcctattttgttttactagttttaagatcagagttcactttctttggactctgcctatattttcttacctgaacttttgcaagttttcaggtaaacctcagctcaggactgctatttagctcctcttaagaagattaaaagagaaaaaaaaaggcccttttaaaaatagtatacacttattttaagtgaaaagcagagaattttatttatagctaattttagctatctgtaaccaagatggatgcaaagaggctagtgcctcagagagaactgtacggggtttgtgactggaaaaagttacgttcccattctaattaatgccctttcttatttaaaaacaaaaccaaatgatatctaagtagttctcagcaataataataatgacgataatacttcttttccacatctcattgtcactgacatttaatggtactgtatattacttaatttattgaagattattatttatgtcttattaggacactatggttataaactgtgtttaagcctacaatcattgatttttttttgttatgtcacaatcagtatattttctttggggttacctctctgaatattatgtaaacaatccaaagaaatgattgtattaagatttgtgaataaatttttagaaatctgattggcatattgagatatttaaggttgaatgtttgtccttaggataggcctatgtgctagcccacaaagaatattgtctcattagcctgaatgtgccataagactgaccttttaaaatgttttgagggatctgtggatgcttcgttaatttgttcagccacaatttattgagaaaatattctgtgtcaagcactgtgggttttaatatttttaaatcaaacgctgattacagataatagtatttatataaataattgaaaaaaattttcttttgggaagagggagaaaatgaaataaatatcattaaagataactcaggagaatcttctttacaattttacgtttagaatgtttaaggttaagaaagaaatagtcaatatgcttgtataaaacactgttcactgttttttttaaaaaaaaaacttgatttgttattaacattgatctgctgacaaaacctgggaatttgggttgtgtatgcgaatgtttcagtgcctcagacaaatgtgtatttaacttatgtaaaagataagtctggaaataaatgtctgtttatttttgtactatttaaaaattgacagatcttttctgaagataaactttgattgtttctata

SEQ ID NO: 21 - DNA, 4209 bp, Homo sapiens
ctctttccgtctcaggtcgccgctgcgaagggagccgccgccatgtctgcgcatctgcaatggatggtcgtgcggaactgctccagtttcctgatcaagaggaataagcagacctacagcactgagcccaataacttgaaggcccgcaattccttccgctacaacggactgattcaccgcaagactgtgggcgtggagccggcagccgacggcaaaggtgtcgtggtggtcattaagcggagatccggccagcggaagcctgccacctcctatgtgcggaccaccatcaacaagaatgctcgcgccacgctcagcagcatcagacacatgatccgcaagaacaagtaccgccccgacctgcgcatggcagccatccgcagggccagcgccatcctgcgcagccagaagcctgtgatggtgaagaggaagcggacccgccccaccaagagctcctgagccccctgcccccagagcaataaagtcagctggctttctcacctgcctcgactgggcctccctttttgaaacgctctggggagctctggccctgtgtgttgtcattcaggccatgtcatcaaaactctgcatgtcaccttgtccatctggaggtgatgtcaatggctggccatgcaggaggggtggggtagctgccttgtccctggtgagggcaagggtcactgtcttcacagaaaaagtttgctgacttgtgattgagacctactgtcccattgtgaggtggcctgaagaatcccagctggggcagtggcttccattcagaagaagaaaggccttttctagcccagaagggtgcaggctgagggctgggccctgggccctggtgctgtagcacggtttggggacttggggtgttcccaagacctgggggacgacagacatcacgggaggaagatgagatgacttttgcatccagggagtgggtgcagccacatttggaggggatgggctttacttgatgcaacctcatctctgagatgggcaacttggtgggtggtggcttataactgtaagggagatggcagccccagggtacagccagcaggcattgagcagccttagcattgtccccctactcccgtcctccaggtgtccccatccctcccctgtctctttgagctggctcttgtcacttaggtctcatctcagtggccgctcctgggccaccctgtcacccaagctttcctgattgcccagccctcttgtttcctttggcctgtttgctccctagtgtttattacagcttgtgaggccaggagtttgagaccatcctaggcaacataatgagacaccgtctctaaaataaaattagctgggtgtggtggtgcaccgcctgtggtcccagctcctcagaggttgagtagaggctgaggtgagcggagcacttgagccaagagtatgaggctgcagtgagcccatgagccccaccactacactccagcctggaagacaccatgacacacagtgaggcctggatggggaaagagtcctgctgttgatcctcacatgtttcctgggcacctaactctgtcagccactgccagggaccaaggatccagcatccatggcacccctggttcctgccatcctggggtacccgattcaaagaaggactctgctccctgtctgagaccacccccggctctgactgagagtaaggggactgtcagggcctcgacttgccattggttggggtcgtacggggctgggagccctgcgttttgaggcagaccactgcccttccgacctcagtcctgtctgctccagtcttgcccagctcgaaggagagcagatctgaccacttgccagcccctgtctgctgtgaattaccatttcctttgtccttcccttagttgggtctattagctcagattgagaggtgttgccttaaaactgagttgggtgacttggtacctgctcaggaccccccgcactgtcccaatcccactcaggcccacctccagctggcctcactccgctggtgacttcgtacctgctcaggagcccccactgtcccagtcccactcaggcccatctctggctggcctcactgcgctgggactccgccttcataaggagagctcactgctcacgttagtagatggccccttctcgtgaggcctctcccctggcacctgcttcagttgtcctccacagcactgatttgcagcccacaagctggcaggtttatctgtctcatgtttgtcttgtgctggtgggcaaggggtttgtctagcacaccagcatataatgagatgcttgatgaatggtgcatattgaatgtataaagcccaccggtcctgagagtttgctcactggagactttctggagatggagtctcgctctgttgcccaggctggcgagtgcaatggcgcgatcttggctcactgcagcctccacctcctgggttcaagcgattctcctgcctcagcctcccgagtagctgggattacaggtgggtgtcaccacacccagctcagtattgtatttttagcagagatggggtttcaccattttgcccaggctggtttggaactcctgacttcaaattacccacctgcctcagcctcccaaagtgctggcattacaggcgctcgaggctttctgatgtggctgctgctgctcagaaggccttgtccttaaccacctccttgcctgccctggaggcttgtgcctctaggccccaccccctgtggagtcctgctggctttctccatccctatctgaatcctccctgctgtgtggcctcccctggtctcatccgtaacacagcccagcttagtgggcctctgttcctgcgggtggccagcctgtctgtgtggctgggctggggaggccacgtctggtatctgaatgctatcggtgggttggggtggaggaaccaggagagggctggagggagggagatggtctcagccccacagagtttggagtcctcagtgtgctgagcaaacgtggagacaccatttccctcctctagacctcatcttggagagagagatgttggatggggccatctattccagctttattcacacaaatcatgtctgttggcctggaaattggaaaaccagttaaaccaaaaacatgatattaagaaaacaggcaggctcaccatagtaaaaatgctgaaagccaaagacaaaattgggagaacaaaagaaaagcgtcttgtcacatacagaaggtccctgataaagttagtagctgccctcatcagaaaccaggcccaggcagtggggacacatccagagtgctgaaagaacctcccccaggtcatcctatccccaagagtgatgcccggcagcattcccagctcagggctaatggttcacggaagccaggaatcaaactgcctgggttccagtcccagctctgccagttatgcccagctgtggggacttgggcagctcgtttagtagcaccgtgcctcagtttcccatatgtaaaaggccattttgagtgcctttcacagccctgcataaggcaggtgtctcagtgttcactgctgtctctccagctcttagtccagtagctgcatggtgagtgagcgtagggcgcaccctggaaggctgccaagcccaaagttgtgcagagcgctggggactccagactccccacagcagcagagactcgggactgaggcatcctctgttcacaggacatgctggcatctactgggtcagggctctgctgctcggtggctgtgcaaccttgggcaagttcctcaacctctctgtgtcttcgtaccctcatctgtaacatgcgtgtcgatagaccctactactcagggttgatgagaagattaaatgtgcaaaacctgcttgactgtgcccacaaatcctgattgtaggaataaattaatgactttttataaatattttgatcagatggactcatgatcacagatgtcttcacatgcctatgactaatttgtacacaaactaatgctcgtgtttcccaagcacctggaagacatgccagatccatgtgcagtaatgcctggtggctccaggtctgccccgccgtcctgtggggctgtgagctttcccagcctcctgcccgtgtttgtgaatatcattctgtcctcagctgcatttccagcccaggctgtttggcgctgcccaggaatggtatcaattcccctgtttctcttgtagccagttactagaataaaatcatctactttaaaa

SEQ ID NO: 22 - DNA, 784 bp, Homo sapiens
agaaggacgcaggcagcaaagagtagtcagtcccttcttggctctgctgacactcgagcccacattccatcacctgctcccaatcatgcaggtctccactgctgcccttgccgtcctcctctgcaccatggctctctgcaaccaggtcctctctgcaccacttgctgctgacacgccgaccgcctgctgcttcagctacacctcccgacagattccacagaatttcatagctgactactttgagacgagcagccagtgctccaagcccagtgtcatcttcctaaccaagagaggccggcaggtctgtgctgaccccagtgaggagtgggtccagaaatacgtcagtgacctggagctgagtgcctgaggggtccagaagcttcgaggcccagcgacctcagtgggcccagtggggaggagcaggagcctgagccttgggaacatgcgtgtgacctccacagctacctcttctatggactggttattgccaaacagccacactgtgggactcttcttaacttaaattttaatttatttatactatttagtttttataatttatttttgatttcacagtgtgtttgtgattgtttgctctgagagttccccctgtcccctccaccttccctcacagtgtgtctggtgacaaccgagtggctgtcatcggcctgtgtaggcagtcatggcaccaaagccaccagactgacaaatgtgtatcagatgcttttgttcagggctgtgatcggcctggggaaataataaagatgttcttttaaacggtaaa

SEQ ID NO: 23 - DNA, 2516 bp, Homo sapiens
aaatggtgccagacgtggtggtatgagcctgtaattccagccactcaggaggctgaggtgggaggatcactctggcctaggagtttgagatcagcctgggtgacagagcaagaccctgtctctagaaaagagaaagaataaatggctgatggagatgactctactgcaaaaatgacaaccagcaagaaagcgggtggtgcccgtttcctccctggggaccctcagagggccaggccattctcttccttggtgtgactgcggatccagggcccagctgaagagcatcagatctgtgggcatgttgcaccagtgaatgttggagaagtacttgttggacacacatgttcctccatttagacagtcacagttcgctggagagaacaaagccaactgttgtaggggtggatactcacatggaacttgatgaagttcattgctgccctggaagagattcgggaggaggcttcatcaaaggtcccatgctccagggactccagggtgagggtaaactggccccaatcccaaaacccactcttccctctccctctcgcctcaccctgttcgtatctagttctcaaatggaagaccatgggtttccagccaggagaaatggattgacccaagcaagcttcatctaccagatgcccgcaggctggggcagtcccggcggcctcttcctcccttgccagccagtgccaacccccgtggttctcaagcctccgctgccaccctgtcccatttcctggggagagtctggccctgctgtggatggaatccggaggaccccagctccctgagcagcccctcctctcccctggtgctgatcagaggtccttgggcagcatcagtcaaagcaagagcgcactcactttggagtcgctcacgaccaggacgcagagaagcaggcgcgccagcagggctctcatggtggcgaggtcggggcgctagacggcggctctgcaaaggaaggagaagtcagggcaagaggcggaggaacgggaaggcaggccaggcgggcgactgcagcgcaggggagatgcccgcggtgaccaggctccccagctgtctctctcctctctgggctccggactccgggcagcctggatcggcacccgcgggggacgcccgggacggggcgccttgactccgtgcagccgccggggagcccagggagcccgggcagcccagggcgggggaggcagacgctcgggagctggggccgccgcgcatccggcccggggatctcaggaccgcggcactcaccggtggctgcggcaggagggcgcgagccggcgctgcggggacaggtggaccctggcccgggctccggggctgcggtctccgcactgtgctgcgacccgcggcgcctgctctatatcagggcccgccccggcgccgcccctccctctcccgcccggctccctcccctgtcttgcagcgctcagcgacccggaccccgcgtgcttccgcaacgctcacaaagatttgggggaagcgcgatctccagcggaggggacccaacagcgtctggactgaggaatcgagaggcttgtaaattctccgtgcttcctcccatgcacctggccgggggcctgccccagtgcaaggagtccccgaattgcagagaggagagaaggcgcacaggagactctctacctcgcccagctctgaagcctcctggggtcctctaatcagttcttctgcaacttctccccgctgggccccaacttgcctaagactgcctcagacccccttgcccgcagctgatggagctgtgaagtcttcatcaacgcgacaaatgtacgagacatactctcccagaagcacagacagaaaaacccctgcctgtaggggctccctctgtgcgtctgttcagtggcagtccccagatatcaccaacacaaccagtggatggaacaaagccgggcttattgctttcggcagtaagggggtttgtttgatggtgctatcagagggggaaaggcaaggccagattactgaaaatttgcagcttggtttaaagtccgtttttgacagggcttgataaggattgggttaggtgtcgtgatatgatgttacaggattgtgggaacaaagtcctagggcataaactgttggtgcttcctattgaagtgttaacgggtcttttgggaagtttccataatgagcaattcatttatttgtgcaggcaagaataaaagtaaagacaatggaaacatgtagacagttctaactgtggaggttctggagggtgtggaagttctgttctcacctctgagtagaggaattgggagactggaggacaaaataagaggaagatttatttttcactgtttgtccttttacactcttaacattttaaaaagcacatctctgtatagcccattccaaaaagataattatgcattttttaatgcatgtgtatttagtgttttacttcatcatagagccttgtttattctattcagatagaaacaattgtttatcaaataaaattgtcctccagaaaaacaaaa

SEQ ID NO: 24 - DNA, 3456 bp, Homo sapiens
agagtcctgagctgaaccaagaaggaggagggggtcgggcctccgaggaaggcctagccgctgctgctgccaggaattccaggttggaggggcggcaacctcctgccagccttcaggccactctcctgtgcctgccagaagagacagagcttgaggagagcttgaggagagcaggaaagggcggcagtaagtcttcagcatcaggcattttggggtgactcagtaaatggtagatcttgctaccagtggaacagccactaaggattctgcagtgagagcagagggccagctaagtggtactctcccagagactgtctgactcacgccaccccctccaccttggacacaggacgctgtggtttctgagccaggtacaatgactcctttcgcagcctcccccgttgcccctctggatccactgcttaaatacggacgaggacagggccctgtctcctcagcttcaggcaccaccactgacctgggacagtgaatcgacaatgccgtcttctgtctcgtggggcatcctcctgctggcaggcctgtgctgcctggtccctgtctccctggctgaggatccccagggagatgctgcccagaagacagatacatcccaccatgatcaggatcacccaaccttcaacaagatcacccccaacctggctgagttcgccttcagcctataccgccagctggcacaccagtccaacagcaccaatatcttcttctccccagtgagcatcgctacagcctttgcaatgctctccctggggaccaaggctgacactcacgatgaaatcctggagggcctgaatttcaacctcacggagattccggaggctcagatccatgaaggcttccaggaactcctccgtaccctcaaccagccagacagccagctccagctgaccaccggcaatggcctgttcctcagcgagggcctgaagctagtggataagtttttggaggatgttaaaaagttgtaccactcagaagccttcactgtcaacttcggggacaccgaagaggccaagaaacagatcaacgattacgtggagaagggtactcaagggaaaattgtggatttggtcaaggagcttgacagagacacagtttttgctctggtgaattacatcttctttaaaggcaaatgggagagaccctttgaagtcaaggacaccgaggaagaggacttccacgtggaccaggtgaccaccgtgaaggtgcctatgatgaagcgtttaggcatgtttaacatccagcactgtaagaagctgtccagctgggtgctgctgatgaaatacctgggcaatgccaccgccatcttcttcctgcctgatgaggggaaactacagcacctggaaaatgaactcacccacgatatcatcaccaagttcctggaaaatgaagacagaaggtctgccagcttacatttacccaaactgtccattactggaacctatgatctgaagagcgtcctgggtcaactgggcatcactaaggtcttcagcaatggggctgacctctccggggtcacagaggaggcacccctgaagctctccaaggccgtgcataaggctgtgctgaccatcgacgagaaagggactgaagctgctggggccatgtttttagaggccatacccatgtctatcccccccgaggtcaagttcaacaaaccctttgtcttcttaatgattgaacaaaataccaagtctcccctcttcatgggaaaagtggtgaatcccacccaaaaataactgcctctcgctcctcaacccctcccctccatccctggccccctccctggatgacattaaagaagggttgagctggtccctgcctgcatgtgactgtaaatccctcccatgttttctctgagtctccctttgcctgctgaggctgtatgtgggctccaggtaacagtgctgtcttcgggccccctgaactgtgttcatggagcatctggctgggtaggcacatgctgggcttgaatccaggggggactgaatcctcagcttacggacctgggcccatctgtttctggagggctccagtcttccttgtcctgtcttggagtccccaagaaggaatcacaggggaggaaccagataccagccatgaccccaggctccaccaagcatcttcatgtccccctgctcatcccccactcccccccacccagagttgctcatcctgccagggctggctgtgcccaccccaaggctgccctcctgggggccccagaactgcctgatcgtgccgtggcccagttttgtggcatctgcagcaacacaagagagaggacaatgtcctcctcttgacccgctgtcacctaaccagactcgggccctgcacctctcaggcacttctggaaaatgactgaggcagattcttcctgaagcccattctccatggggcaacaaggacacctattctgtccttgtccttccatcgctgccccagaaagcctcacatatctccgtttagaatcaggtcccttctccccagatgaagaggagggtctctgctttgttttctctatctcctcctcagacttgaccaggcccagcaggccccagaagaccattaccctatatcccttctcctccctagtcacatggccataggcctgctgatggctcaggaaggccattgcaaggactcctcagctatgggagaggaagcacatcacccattgacccccgcaacccctccctttcctcctctgagtcccgactggggccacatgcagcctgacttctttgtgcctgttgctgtccctgcagtcttcagagggccaccgcagctccagtgccacggcaggaggctgttcctgaatagcccctgtggtaagggccaggagagtccttccatcctccaaggccctgctaaaggacacagcagccaggaagtcccctgggcccctagctgaaggacagcctgctccctccgtctctaccaggaatggccttgtcctatggaaggcactgccccatcccaaactaatctaggaatcactgtctaaccactcactgtcatgaatgtgtacttaaaggatgaggttgagtcataccaaatagtgatttcgatagttcaaaatggtgaaattagcaattctacatgattcagtctaatcaatggataccgactgtttcccacacaagtctcctgttctcttaagcttactcactgacagcctttcactctccacaaatacattaaagatatggccatcaccaagccccctaggatgacaccagacctgagagtctgaagacctggatccaagttctgacttttccccctgacagctgtgtgaccttcgtgaagtcgccaaacctctctgagccccagtcattgctagtaagacctgcctttgagttggtatgatgttcaagttagataacaaaatgtttatacccattagaacagagaataaatagaactacatttcttgca

SEQ ID NO: 25 - DNA, 1635 bp, Homo sapiens
gctcagcatttggggacgctctcagctctcggcgcacggcccaggttatcttgtagcatagcaacttcggatttcactctacccggagagtttcccgcttggttgaacacattggcctcaggaagcttccttcaaaatgtctactgttcacgaaatcctgtgcaagctcagcttggagggtgatcactctacacccccaagtgcatatgggtctgtcaaagcctatactaactttgatgctgagcgggatgctttgaacattgaaacagccatcaagaccaaaggtgtggatgaggtcaccattgtcaacattttgaccaaccgcagcaatgcacagagacaggatattgccttcgcctaccagagaaggaccaaaaaggaacttgcatcagcactgaagtcagccttatctggccacctggagacggtgattttgggcctattgaagacacctgctcagtatgacgcttctgagctaaaagcttccatgaaggggctgggaaccgacgaggactctctcattgagatcatctgctccagaaccaaccaggagctgcaggaaattaacagagtctacaaggaaatgtacaagactgatctggagaaggacattatttcggacacatctggtgacttccgcaagctgatggttgccctggcaaagggtagaagagcagaggatggctctgtcattgattatgaactgattgaccaagatgctcgggatctctatgacgctggagtgaagaggaaaggaactgatgttcccaagtggatcagcatcatgaccgagcggagcgtgccccacctccagaaagtatttgataggtacaagagttacagcccttatgacatgttggaaagcatcaggaaagaggttaaaggagacctggaaaatgctttcctgaacctggttcagtgcattcagaacaagcccctgtattttgctgatcggctgtatgactccatgaagggcaaggggacgcgagataaggtcctgatcagaatcatggtctcccgcagtgaagtggacatgttgaaaattaggtctgaattcaagagaaagtacggcaagtccctgtactattatatccagcaagacactaagggcgactaccagaaagcgctgctgtacctgtgtggtggagatgactgaagcccgacacggcctgagcgtccagaaatggtgctcaccatgcttccagctaacaggtctagaaaaccagcttgcgaataacagtccccgtggccatccctgtgagggtgacgttagcattacccccaacctcattttagttgcctaagcattgcctggccttcctgtctagtctctcctgtaagccaaagaaatgaacattccaaggagttggaagtgaagtctatgatgtgaaacactttgcctcctgtgtactgtgtcataaacagatgaataaactgaatttgtactttagaaacacgtactttgtggccctgctttcaactgaattgtttgaaaattaaacgtgcttggggttcagctggtgaggctgtccctgtaggaagaaagctctgggactgagctgtacagtatggttgcccctatccaagtgtcgctatttaagttaaatttaaatgaaataaaataaaataaaatca

SEQ ID NO: 26 - DNA, 3422 bp, Homo sapiens
agaaggagttgggagatgagccttccgcaaactcctgacctgtgggtccgtccgttcaacggccaaaggctggcggaggagggatcccctgcctttctcggaacggaacggagcagagtcgtgcgtggttgagtttagataaaagccgagtgagcgcgctctgttccttaagattagtttaaggtgccttggattgctctgaagagctttgaccacctgatattgcttacatctggaacttcttggcttctcattccccagatgtgcgggtcagagaggattctacaggcaggaaacatcttagaaatcagggttgggcaggcaggagccaggagagtagctacaatgacttcaccagtactggtggacatacgagaagaggtgacctgccctatctgcctggagctcctaacagaacccctgagcatagactgtggccacagcttctgccaagcctgcatcacaccaaatggcagggaatcagtgattggtcaagaaggggaaagaagctgccctgtgtgccagaccagctaccagccagggaacctgcggcctaatcggcatctggccaacatagtgaggcggctcagagaggtagtgttgggccctgggaagcagctgaaagcagttctttgtgcagaccatggagaaaaactgcagctcttctgtcaggaggatgggaaggtcatttgctggctttgtgagcggtctcaggagcaccgtggtcaccacacgttcctcgtggaggaggttgcccaggagtaccaggagaagtttcaggagtctctaaagaagctgaagaacgaggagcaggaagctgagaagctaacagcttttatcagagagaagaaaacatcctggaagaatcagatggagcctgagagatgcaggatccagacagagtttaatcagctgcgaaatatcctagacagagtggagcaacgggagctgaaaaagctggaacaggaagagaagaaggggctacgaattatagaagaggctgagaatgatctggtccaccagacccagtcgctgcgagagctcatctcggatctggagcgtcgatgtcaggggtcaacaatggagctgctgcaggatgtgagtgatgtcacagaaaggagtgagttctggaccctgaggaagccagaagctctccctacaaagctgagaagtatgttccgagccccagatctgaaaaggatgctgcgagtgtgtagagagctgacagatgtccaaagctactgggttgacgtgaccctgaatccacacacagctaatttaaatcttgtcctggctaaaaaccggagacaagtgaggtttgtgggagctaaagtatctggaccttcctgtctggaaaagcattatgactgtagtgtcctgggctcccagcacttctcctctggtaagcattactgggaggtagatgtggccaagaagactgcctggatcctgggggtatgcagcaattcactgggacctacattctctttcaaccattttgctcaaaatcacagtgcttactccaggtatcagcctcagagtggatactgggtgattgggttacagcataaccatgaatatagggcctatgaggattcttccccttccctgcttctctccatgacagtgccccctcgccgtgttggggttttcttagattatgaggctggtactgtctccttttataatgtcacaaaccatggcttccccatctacactttctctaaatattactttcccactactctttgtccatattttaatccttgcaactgtgtaattcctatgaccctgcgtcgtccaagctcttgaatattcttctgttcccacccacttctgataagtaccctgaggcttatcagcatgtgattctcccttctgatcttctgtttttctgtgttctcaattcttttgttgttttttggtttttgaatcttttttgagatggaatctcgctctgtcgcccaggctggagtgcactggcgcaatctcggctcactgcaacctctgcctcctgggttcaagcgaacctcctgcctcagcatcccaagtagctgggattacaggcacccaccaccatgcccaactaatttttgtatttttatagagatagggtttcaccgtgttggccaggctgatctcgaactcctgaccgcaagtgatccacccgcctcggtctcccaaagtgctgggattacagatgtgagccgccgcgcccagacagttctttcgttttaaacagttactcagtactaggatgcacccagtggtgagagtaagcatctttgactgatgacaggtcttgaggtggatagggggcgctttcagtattttgccattaagcatagtatttgatgcaggttttttttgattgatgcaggggatcaaatttaggaagttctgatctgttaatttactacaagtttttgtataaaatgaaaactcgtattctacctatgtcttttctgtaaattattgagacaattgtgtatcatttttgttctgttaatgtggcttagtacattgatttacttcaatttgttaccacaacttgctgaaatacaccattattatttgttgtatgcaatactggatttattttgataacgtattgtttagattttgttctcatctatgttaatgaaagaaattggcctgtatttttacattcttgtaatatctttgccaggttctataaaatgcaataataagcaaataaattactttgtttttgtataagtatgtataggattgagctctaaaaccaaaccattataatgataatttgggtagcttcaaactcaaattgaagagagtcttcactacaatcttcactacaacctttggccttcctctctacatttaagagtagcaatagaacaataaaaaaaaatacgtctttcaaattaattgcagtaaaaacaaaagagtagtggggagagaaaaacaatccaatacatatttttctctcagaatagaaagaaaacacaaagagaaaatatgaacaatataaagcacttaaaggaagaggatgatttcttccagcttttccacactctctttatgcgcaggaacaaacagctgttgagtgagctgctatgactttggtagagaggtgcaatatgttttttgaaccagctataaaagaaattaagaggtacatgtgagggtagaaacaaatatcaaggatgagaatggcactggctgtcccatatggtatccaggagccaccaatgtctgttgagtacttcatacatgcctagtctgaattgagatgtgctcaatgtataaaatatataccagatttcaaatacctacttcaaaaaataatgtaaaatatctcactaataacttttcctttgtgtattgcaatgataatatgttggctctattggattaaataaagtatgttattcatttta

SEQ ID NO: 27 - DNA, 833 bp, Homo sapiens
cttttcctctttgactgagcaccgaggggcagttggcagcttcacctcagagctgcaggaaggaacggggcagtgaaaatcgaatcgggtgtgatcctaggccaagctcatggcccagcagggccagcaggggcagatggcaagtggagacagcaatctcaacttcaggatggtcgcagagatccagaacgtagagggtcagaacctgcaggagcaggtttgccctgagcccattttcaggttcttcagagaaaacaaggtggagattgcaagtgcaataacaaggccatttcctttccttatgggcctccgagaccgctccttcatctccgagcagatgtatgaacattttcaagaagcttttagaaacctggtcccagtgacaagagtgatgtattgtgtactcagtgaactggagaagacatttggctggtcacatctggaagcattgttcagcaggattaacctgatggcctatcctgatttaaacgagatttacagaagcttccagaatgaaaatttatcatccagtgcagtcctgtgtcaacttgtttctccaaacaaagactggagaagtcacgaagagagcctagcacatactggtacactgaggaggagctgcatgtgaaagctatgaagacagaaaagggggttggtgggggcctttccgaaccatgtggttgaattgcagactgtgggaggcagggtgtgagagctgactctggagaaagaagttgaagtggattctggaaggcttgacaccctgtgctaaggaatctggagtttaatttttggaaaataaagaaggaataaagggcatttaaacgggaaaa

SEQ ID NO: 28 - DNA, 466 bp, Homo sapiens
gggaggagagaaaagccatggccgacaaggtcctgaaggagaagagaaagcagtttatccgttcagtgggcgaaggtacaataaatggcttactgggtgaattattggagacaagggtgctgagccaggaagagatagagatagtaaaatgtgaaaatgctacagttatggataaggcccgagctttgcttgactctgttattcggaaaggggctccagcatgccaaatttgcatcacatacatttgtgaagaagacagtcacctggcagggacgctgggactctcagcaggtccaacatctggaaatcaccttactacacaagattctcaaatagtacttccttcctaggttcaactttcatttgagcagccagatgataaagcacagatgcccagcactgaaagagttacttcgacaagacgtttctatctcttcccagtacattaaaataaggaagctgtatg

SEQ ID NO: 29 - DNA, 1015 bp, Homo sapiens
gtgctcccggaaaggcactgggcgaccgcacccgtggctttctctgggcgaccgggtcccagactccccccagcacagcagagcgcttccctgcccacccgcggaaaccgccccaggtgggccgcgccccctccccagcagccagcagggcgccagggctgagccggccgtggaggggagcgggtcccgcgggttatacaggcgccggggctccgcggcaggatgcagcaccgaggcttcctcctcctcaccctcctcgccctgctggcgctcacctccgcggtcgccaaaaagaaagataaggtgaagaagggcggcccggggagcgagtgcgctgagtgggcctgggggccctgcacccccagcagcaaggattgcggcgtgggtttccgcgagggcacctgcggggcccagacccagcgcatccggtgcagggtgccctgcaactggaagaaggagtttggagccgactgcaagtacaagtttgagaactggggtgcgtgtgatgggggcacaggcaccaaagtccgccaaggcaccctgaagaaggcgcgctacaatgctcagtgccaggagaccatccgcgtcaccaagccctgcacccccaagaccaaagcaaaggccaaagccaagaaagggaagggaaaggactagacgccaagcctggatgccaaggagcccctggtgtcacatggggcctggcccacgccctccctctcccaggcccgagatgtgacccaccagtgccttctgtctgctcgttagctttaatcaatcatgccctgccttgtccctctcactccccagccccacccctaagtgcccaaagtggggagggacaagggattctgggaagcttgagcctcccccaaagcaatgtgagtcccagagcccgcttttgttcttccccacaattccattactaagaaacacatcaaataaactgactttttccccccaataaaagctcttcttttttaatatataaaagccccttaaaaaaaaaaaaaaaaaa

SEQ ID NO: 30 - DNA, 2245 bp, Homo sapiens
cccttccccccgcctctggcctcggggaaggagcaggaggcagcccaggcggagcgggaggagctggcagcggggcgcatgccaggcgggggtcctcagggcgccccagccgccgccggcggcggcggcgtgagccaccgcgcaggcagccgggattgcttaccacctgcagcgtgctttcggaggcggcggctggcacggaggccgggctacatgagaagctcgacagggcctgggatcgggttcctttccccagcagtgggcacactgttccggttcccaggaggggtgtctggcgaggagtcccaccactcggagtccagggccagacagtgtggccttgactcgagaggcctcttggtccggagccctgtttccaagagtgcagcagcccctactgtgacctctgtgagaggaacctcggcgcactttgggattcagctcagaggtggcaccagattgcctgacaggcttagctggccgtgtggccctgggagtgctgggtggcagcaagagtttgcagccatggatagttctgagaccctggacgccagctgggaggcagcctgcagcgatggagcaaggcgtgtccgggcagcaggctctctgccatcagcagagttgagtagcaacagctgcagccctggctgtggccctgaggtccccccaacccctcctggctctcacagtgcctttacctcaagctttagctttattcggctctcgcttggctctgccggggaacgtggagaagcagaaggctgcccaccatccagagaggctgagtcccattgccagagcccccaggagatgggagccaaagctgccagcttggacgggcctcacgaggacccgcgatgtctctctcggcccttcagtctcttggctacacgggtctctgcagacttggcccaggccgcaaggaacagctccaggccagagcgtgacatgcattctttaccagacatggaccctggctcctccagttctctggatccctcactggctggctgtggtggtgatgggagcagcggctcaggggatgcccactcttgggacaccctgctcaggaaatgggagccagtgctgcgggactgcctgctgagaaaccggaggcagatggaggtaatatccttaagattaaaacttcagaaacttcaggaagatgcagttgagaatgatgattatgataaagctgagacgttacaacaaagattagaagacctggaacaagagaaaatcagcctgcactttcaacttccttcaaggcagccagctcttagcagtttcctgggtcacctggcagcacaagtccaggctgccttgcgccgtggggccactcagcaggccagcggagatgacacccacaccccactgagaatggagccgaggctgttggaacccactgctcaggacagcttgcacgtgtccatcacgagacgagactggcttcttcaggaaaagcagcagctacagaaagaaatcgaagctctccaagcaaggatgtttgtgctggaagccaaagatcaacagctgagaagggaaatagaggagcaagagcagcaactccagtggcagggctgcgacctgaccccactggtgggccagctgtccctgggtcagctgcaggaggtcagcaaggccttgcaggacaccctggcctcagccggtcagattcccttccatgcagagccaccggaaaccataaggagcctccaggaaagaataaaatccctcaacttgtcacttaaagaaatcactactaaggtgtgtatgagtgagaaattctgcagcaccctgaggaagaaagttaacgatattgaaacccaactaccagccttgcttgaagccaaaatgcatgccatatcaggaaaccatttctggacggctaaagacctcaccgaggagattagatcattaacatcagagagagaagggctggagggactcctcagcaagctgttggtgttgagttccaggaatgtcaaaaagctgggaagtgttaaagaagattacaacagactgagaagagaagtggagcaccaggagactgcctatggatataagtactgtgatgcagagtcctggacacagagaagtcagcaacttgcctgaggacagcctgcaggacacagcactgtgatttgaacccagagagtctgacttcagcccccagcgctcaactactattaattgaaagggcattgaagagacatgatgtcacaataaaaagaaaaaaagaaaa

SEQ ID NO: 31 - DNA, 6781 bp, Homo sapiens
actcaggcgctggctgctgtgtggctcagagcgcccagtccgacgccaggctctgcgctcggtctcctctgctccacctcctccccgcggggcgtgcagctccgaagctctttggacctagcaggttcggcggccgggaggtgccattcacatcaaatgtagccattttagaggtgtcaaaataaatcagccatatttaataaattccagctctactcttctaccctgtagcccaagaagcagcaacgatggggtcaaaggatcatgcagtatttttcagggaaatgacacagttaattttgaatgaaatgccaaaagctgggtattccagcatattaaatgattttgtggaatctaatttttttgtgattgatggagattccttgcttgtcacatgcctgggtgtaaaatcattcaagtggggacagaatctccactttttctatctggttgaatgctatcttgtggatcttctgagtaacggaggacaattcaccatagttttctttaaggatgctgaatatgcatattttgattttcctgaacttctttcattgaggaccgctttaattctccaccttcaacacaatactaacattgatgtgcaaacggagttttctggatgcttatcacaagattggaagttattcttggaacagcattacccgtattttctgatagtttcagaggaaggcctgagtgatttacaaacgtacctttttaacttcctaatcatacattcctggggaatgaaagtcaatgttgtgctttcatcagggcatgaatctgatactctcagattttatgcatatactatggaaagcacagacagaaaccaaactttttccaaggagaatgaaacagtgattcagagtgcatataaaagcctcatacaacacttggaagaaataagggttttagtattagcaactcattttgaacatttgaaatggaatgatatgatggaagaggcgtatcagactctatttctgcttcagcacctatggtcagaaggatcggacatccagcgtgttctctgtgtcacttcatgttcactatccttgagaatgtaccatcgtgtcttagtgcacagtaattgcctatccctgcaggaggtggaagatttctgcagactgcgttgcctctgtgtggcttttcaactccacttacccctttctcagagagcttgttctcgagtcatcacatgctcttggattaggaacagtgattctttcttaaaaatgaacaagtggtgtgaatatttcattttaagcaacttaaacgtttttggatgctggaatctgaatttaaatcatgtttctgacttgtatgatgagcaattgttaaagaatatagccttctactatgaatttgaaagtactcaagaaccacatttgaatttgggagattccattaggagggattatgaagacctgtggaatgttgtgtcacacctggttaaagaatttaacgttggaaagtcttttcctctgagaacaacaagaagacattttcttagacaagagaaatcggtcattcaagaaatctccttggaaaagatgcctagtgtgggctttattccaatgacatctgctgtaattgatgagtttgttggagatatgatgaaggatttgcctattctaaagagtgatgatccggttgttccttcactgtttaaacaaaagacatctgatgaacttttgcactggcatgctcaaagactccttagtgacgactatgacaggatcaaatgtcatgttgatgaacaatctagagatcctcatgttcttgatttcctgaaaaagattcaggattatcagcaattttatgggaaatcgttagaatcaatctctacgaaagtcattgtgactcaaactactcggccaaaggaggattccagtggtgccagtggtgaaatattacagaataccaaaccccaccaaattaccaaaaagagtaagaaaaagtcatttctcaaagaagatcagaacaaagctcagcaaaacgatgatctgctgttttctattgaagaggagatgaagaacaatttacattctggaataaggaaattggaagattatttgacatcatgtgcaagtaattcagtgaaatttggagttgaaatgttaggattaattgcctgctttaaagcatggaaaaaacattgccgaggtgaaggcaaaatttcgaaagatttaagtatagctgttcaaatgatgaaaaggattcattcactcctggagagatacccagaaattttggaagcagaacatcatcaatatatagctaaatgccttaaatatttaggctttaatgatctggcaaactctttggatccaactctgataggagatgacaaaaataagaagaaatattcgattgacattggaccagctcggtttcaactgcaatacatgggccattacttgataagagatgaaagaaaagatcgggatcccagggtccaggattttattcccaacgcatggcagcaggaactcctggatgtggtagataagaatgagtcagcagtgattgttgccccaacgtcctcaggcaaaacctatgcttcctactactgcatggagaaagtgctgagggagagcgatgtcggggtggttgtgtacgttgcacccgcaaagtcccttgttggtcaagtggctgcaactgttgagaatcgttttactaaaacgttgcctgccggcagaactctatgcggtgcttttacaagagattattgtcacaatgtactaaactgtcaggtacttattacagtgccggaatgttttgaaatcctgttgcttgctcctcatcgccaaaaatgggtggaaaggatcagatatgttatatttgatgaggtccattatcttggcagagaagttggagcaaaattttgggagctcctccttgtcattattcgatgtccctttttggttctttcagctaccataaataacccaaatcttctcaccaagtggctgcaatcagtaaaacagtactggaaacaggcagacaagattatggaagagaaatgtatttctgaaaaacaggctgacaaatgtctcaactttctccaagaccattcatataaaaatcaatcatatgaagttagacttgtgctctgtggagagagatacaatgatttagagaagcatatatgttcagtaaaacatgatgatgtttattttgatcattttcatccctgtgctgcgctaacgacagatattattgaaaagtatggattcccacctgatcttaccctcacccctcaagaaagcatccagctttatgataccatggctcaagtctgggaaacttggcccagggctcaggaattgtgtccagaggaattcattctttttaagaataagatagtcattaagaagttggatgctagaaaatatgaagaaaacttaaaggcagaattgacaaattggattaaaaatggccaagtgaagaaggtcaaaagagtactgaagaaccttagtccggattcattgtctagttcaaaagatatggtgaaaatgtttcctcttcttgttgaaaagttaagacaaatggataagttgcctgcaatattttttttgtttaagaatgatgatgtgggaaaaagagctggaagtgtgtgcacttttctggagaagacagagacaaaaagccatccccacactgaatgtcatagttatgtctttgcaatagatgaagtacttgaaaaagtgaggaagacacagaaaaggatcactaaaaaaaacccaaagaaggctgaaaaactggaaagaaaaaaagtgtatagagctgaatatattaatttcctggagaatctgaagattctggaaatttctgaggactgcacgtatgctgatgtcaaagccctacacactgaaattaccaggaataaagactcaactttggagagggtattaccgcgagtgcgatttacaagacacggcaaagaactgaaggctttagcacaaagggggattggatatcatcacagcagcatgtattttaaagaaaaagagtttgttgagatactctttgtaaaagggcttattagggtagtgacagctactgaaacacttgccttagggatccacatgccatgcaaatctgttgtttttgcccaagactcagtctatctggatgctttaaattacagacagatgtctggtcgtgctggaagaagaggtcaagacctgcttggaaatgtgtatttctttgatatcccattgcccaaaataaaaagactccttgcatccagtgttcctgagctgagaggacagttccctctcagcataaccctggtcctgcgactcatgctgctggcttccaagggagatgacccagaggatgccaaggcaaaggtgttgtcagtgctaaagcattcattgctgtcttttaagagacgaagagccatggagactttgaaactttactttttgttttccttgcagctccttatcaaagaggactatttaaataaaaagggtaatccaaagaaatttgcaggacttgcatcatatttgcatggtcatgaaccttcaaatcttgtttttgtaaattttctcaagagaggccttttccataatctctgtaagccagcctggaaaggctcacaacaattttcccaagatgtgatggaaaagctcgtgttagtattggcaaatttgtttggaagaaaatatattccagcaaaattccaaaatgctaatttaagtttttctcagtcaaaggtgatccttgccgaactcccggaggattttaaagctgctttatatgagtataacctggcagtaatgaaggattttgcctccttcctgctgattgcttccaagtcggtgaacatgaaaaaagagcatcaactccctttgtcaagaatcaaattcacaggtaaagaatgtgaagactcccaactcgtgtctcacttgatgagctgcaagaaaggaagagtagccatttcaccatttgtttgtctttcggggaacacagataatgatttgcttcgaccagagactatcaaccaggtcatcctgcgcacagtcggtgttagtggcactcaggctcctctgctgtggccatggaaattagataaccgaggaaggagaatgccactaaatgcatatgtgctcaatttctataaacacaactgcttgacaagattagaccaaaaaaatgggatgcgtatgggacagcttttaaagtgtttgaaagattttgcattcaacattcaggctatcagtgactccttgagtgaactatgtgaaaataagcgtgacaatgtagtcctggcatttaaacaattgagtcaaaccttttatgagaaacttcaagaaatgcaaattcaaatgagtcaaaatcatttagaataacaccatggaaaactttcaagtctgattatgtggtatttatccctttgcaaggagagatataattaagcttacacaatgaaatggaaaaaatgtttgtcttggagtcaaacagaattaaactcagatatcagctctgctattttctaactgaatgactttaagttatgtaatatatctgagctttaacttcatttttggcaaaaccggagtaaaaatgaatacctctagttgttttgaggattaaatgagataatgtaagaaaagtgattgggattgggtggtgacttaatgaacggtagtggtttttttagtagttaatgtatagcaaaattagtttcacattgtcaagttttcaatacatccccaagttaattgaattttaaattaatgatcaataaatcacaaaggacccaaatcaattctgaacaacaatttagttatgtaagaagacttctgagattacaagaaactcactgctgtggactggatgtttgtgccctcccctccaaaatttttatattgaaattctaaccctcaatgtgatggtattaggagatgataggtcatgagggtggagctccttggatgtaattagtgcctttaacagagagacaagagagcttgttctccaatctctgctcactaccactggatgatacaatgggaagatggccatctgcagaccaagaagcaagccctcaacagaactgaatctacttacaccatgatcttgaactttccagcctccaggattgtgagaaatacatgtttgttgtttagccatctagtctgtggttttctgttgaagcagtctgaattgactaaaacagtcacttggagtagttataaaccactttcctgttgaaagcagaacatgctgattcaactgttttgttcaatagcaatgatagattttgtttaagtcccctacactttcttatttctaaatgatcaagagtacacttcctggcagtgattaaggagtgtgtatctaacagaaaaaatatatataccctgtgaacccgaatatggaattcagattgtttctgccctcagtatcatacttaaaaaacaagcatacaaacaaacataagggaacaaacagcaaccataacaaaaacaaacctttaaaggtgcgtttttgctgtgataaatgaatacggtactctgaaggagaaaaaagtttctcaaatgagcttaaactgcaagtgatttaaaaattagagaatataattcttaaagctattgaaagtttcaaccagaaaacctcaagtgaattttgtatgtaaatgaaatcttgaatgtaagttctgtgattctttaagcaaacaattagctgaaaacttggtattgttgtagtttatgtagtaagtgacttggcacccatcagaaaataaagggcattaaattga

SEQ ID NO: 32 - DNA, 914 bp, Homo sapiens
tgtggcagatttcagaggcccttaaaatgaggccaagtgaggtggacaggtccgagccagctgaggactcctcagccacacggcacagctgcctgaggggatgtgtcactcagggagttgctgggacctactgggcccagcgttgccatcagcaccaacagcttcagagagggggacacatgccggggtgactccaaggctgtgggcggcacctgcctcagatagagaacaggcacagagacactactgggggacactactgggacactggccacccccctaccctgtgcctagatcacagcctacacactgcagccctgtgcccctcacacccagcaggttcctgctccagcgcggctcctggactggccccgggtgctggccccgggggtttcaatccaagcataattcagtgaagcatgtgtttggcagcgggacccagctcaccgttttaggtcagcccaaggccaccccctcggtcactctgttcctgccgtcctctgaggagctccaagccaacaaggccacactggtgtgtctcatgaatgacttctatctgggaatcttgacggtgacctggaaggcagatggtacccccatcacccagggcgtggagatgaccacgccctccaaacagagcaacagcaagtacatggccagcagctacctgagcctgacgcccgagcagtggaggtcccgcagaagctacagctgccaggtcatgcatgaagggagcactgcagagaagacggtggcccctgcagaatgttcataggttcccagcccccaccccacccacaggggcctggagctgcaggatcccaggggaggcgtctctctctgcatcccaagccatccagcccttctccctgtacccagtaaaccctcagtaaatatcctctttgtcaaccaga

SEQ ID NO: 33 - DNA, 4724 bp, Homo sapiens
aagcgcccaagtcgcactcccgcctcatccaaggcagcctgcgtggctcccgggagcgcgcacgtcccggagcccatgccgaccgcaggcgccgtatccgcgctcgtctagcagccccggttacgcggttgcacgtcggccccagccctgaggagccggaccgatgtggaaactgctgcccgccgcgggcccggcaggaggagaaccatacagacttttgactggcgttgagtacgttgttggaaggaaaaactgtgccattctgattgaaaatgatcagtcgatcagccgaaatcatgctgtgttaactgctaacttttctgtaaccaacctggtatagaaaaacattttggaaatttctacagaaaaagtaaaattgttactagtcaaacagatgaaatccctgtattgacattaaaagataattctaagtatggtacctttgttaatgaggaaaaaatgcagaatggcttttcccgaactttgaagtcgggggatggtattacttttggagtgtttggaagtaaattcagaatagagtatgagcctttggttgcatgctcttcttgtttagatgtctctgggaaaactgctttaaatcaagctatattgcaacttggaggatttactgtaaacaattggacagaagaatgcactcaccttgtcatggtatcagtgaaagttaccattaaaacaatatgtgcactcatttgtggacgtccaattgtaaagccagaatattttactgaattcctgaaagcagttgagtccaagaagcagcctccacaaattgaaagtttttacccacctcttgatgaaccatctattggaagtaaaaatgttgatctgtcaggacggcaggaaagaaaacaaatcttcaaagggaaaacatttatatttttgaatgccaaacagcataagaaattgagttccgcagttgtctttggaggtggggaagctaggttgataacagaagagaatgaagaagaacataatttctttttggctccgggaacgtgtgttgttgatacaggaataacaaactcacagaccttaattcctgactgtcagaagaaatggattcagtcaataatggatatgctccaaaggcaaggtcttagacctattcctgaagcagaaattggattggcggtgattttcatgactacaaagaattactgtgatcctcagggccatcccagtacaggattaaagacaacaactccaggaccaagcctttcacaaggcgtgtcagttgatgaaaaactaatgccaagcgccccagtgaacactacaacatacgtagctgacacagaatcagagcaagcagatacatgggatttgagtgaaaggccaaaagaaatcaaagtctccaaaatggaacaaaaattcagaatgctttcacaagatgcacccactgtaaaggagtcctgcaaaacaagctctaataataatagtatggtatcaaatactttggctaagatgagaatcccaaactatcagctttcaccaactaaattgccaagtataaataaaagtaaagatagggcttctcagcagcagcagaccaactccatcagaaactactttcagccgtctaccaaaaaaagggaaagggatgaagaaaatcaagaaatgtcttcatgcaaatcagcaagaatagaaacgtcttgttctcttttagaacaaacacaacctgctacaccctcattgtggaaaaataaggagcagcatctatctgagaatgagcctgtggacacaaactcagacaataacttatttacagatacagatttaaaatctattgtgaaaaattctgccagtaaatctcatgctgcagaaaagctaagatcaaataaaaaaagggaaatggatgatgtggccatagaagatgaagtattggaacagttattcaaggacacaaaaccagagttagaaattgatgtgaaagttcaaaaacaggaggaagatgtcaatgttagaaaaaggccaaggatggatatagaaacaaatgacactttcagtgatgaagcagtaccagaaagtagcaaaatatctcaagaaaatgaaattgggaagaaacgtgaactcaaggaagactcactatggtcagctaaagaaatatctaacaatgacaaacttcaggatgatagtgagatgcttccaaaaaagctgttattgactgaatttagatcactggtgattaaaaactctacttccagaaatccatctggcataaatgatgattatggtcaactaaaaaatttcaagaaattcaaaaaggtcacatatcctggagcaggaaaacttccacacatcattggaggatcagatctaatagctcatcatgctcgaaagaatacagaactagaagagtggctaaggcaggaaatggaggtacaaaatcaacatgcaaaagaagagtctcttgctgatgatctttttagatacaatccttatttaaaaaggagaagataactgaggattttaaaaagaagccatggaaaaacttcctagtaagcatctacttcaggccaacaaggttatatgaatatatagtgtatagaagcgatttaagttacaatgttttatggcctaaatttattaaataaaatgcacaaaactttgattcttttgtatgtaacaattgtttgttctgttttcaggctttgtcattgcatctttttttcatttttaaatgtgttttgtttattaaatagttaatatagtcacagttcaaaattctaaatgtacgtaaggtaaagactaaagtcacccttccaccattgtcctagctacttggttcccctcagaaaaaaattcatgatactcatttcttatgaatctttccagggatttttgagtcctattcaaattcctatttttaaataatttcctacacaaatgatagcataacatatgcagtgttctacaccttgcttttttacttagtagattaaaaattataggaatatcaatataatgtttttaatattttttcttttccattatgctgtagtcttacctaaactctggtgatccaaacaaaatggcttcagtggtgcagatgtcacctacatgttattctagtactagaaactgaagaccatgtggagacttcatcaaacatgggtttagttttcaccagaatggaaagacctgtacccctttttggtggtcttactgagctgggtgggtgtctgttttgagcttatttagagtcctagttttcctacttataaagtagaaatggtgagattgttttctttttctaccttaaagggagatggtaagaaacaatgaatgtcttttttcaaactttattgacaagtgattttcaagtctgtgttcaaaaatatattcatgtacctgtgatccagcaagaagggagttccagtcaagagtcactacaactgattagttgtttagagaatgagaaatggaacagtgaggaatggaggccatatttccatgacttcccttgtaaacagaagcaacagaagggacaagaggctggcctctacatcactctcaccttccaaatcttgtggaagtgcatctacttgccagaaccaaattaacttacttccaagttctggctgcttgcaggtggaactccagctgcaagggagttagggaaatgaaggtctttttttaaaagcttctcagccttcctagggaacagaaattgggtgagccaatctgcaatttctactacaggcattgagaccagttagattattgaaatattatagagagttatgaacacttaaattatgatagtggtatgacattggatagaacatgggatactttagaagtagaattgacagggcatattagttgatgaaatggagtcatttgagtctcttaatagccatgtatcataattaccaagtgaagctggtggaacatatggtctccattttacagttaaggaatataatggacagattaatattgttctctgtcatgcccacaatccctttctaaggaagactgccctactatagcagtttttatatttgtcaatttatgaatataatgaatgagagttctggtacctcctgtctttacaaatattggtgttgtcagtatttttcctttttaaccattccaatcggtgtgtagtgatgtttcattttggttttaatttgtatatccctgatagctataattgggtcatagaaattctttatacattctagatgcaagtctcttgtcggatatatgtattgagatattacacctagtctgtggcttgactgttttctttatgtcttttgatgaatagaagttttaaattttgacaaggtcaaatttatttttttcttttgtttgatattttttctctccaatttaaccccaagatttcagatattctgctctattatataaactttatatttttatatttgtgatctaccttgaattgatatgtatgttgtgaattatggatcagggttctttttttcccccatacaagtatccagtcattgtaacactgtttattgaaagaattatcctttcctcattaaattaccttgccaattagtaaaaaatcaattaaccataatggtggatctgtttctggactttctgtttggttacactgaaatgtttgtccatccttgcactcactcataccatactgccttgaattactgtagctgcatagatgctccttaagttgggattacattgtaataaacgcaatgtaagtt

SEQ ID NO: 34 - DNA, 3438 bp, Homo sapiens
agcacagagagtggaaaacagcagaggtgacagagcagccgtgctcgaagcgttcctggagcccaagctctcctccacaggtgaagacagggccagcaggagacaccatggggcacctctcagccccacttcacagagtgcgtgtaccctggcaggggcttctgctcacagcctcacttctaaccttctggaacccgcccaccactgcccagctcactactgaatccatgccattcaatgttgcagaggggaaggaggttcttctccttgtccacaatctgccccagcaactttttggctacagctggtacaaaggggaaagagtggatggcaaccgtcaaattgtaggatatgcaataggaactcaacaagctaccccagggcccgcaaacagcggtcgagagacaatataccccaatgcatccctgctgatccagaacgtcacccagaatgacacaggattctacaccctacaagtcataaagtcagatcttgtgaatgaagaagcaactggacagttccatgtatacccggagctgcccaagccctccatctccagcaacaactccaaccctgtggaggacaaggatgctgtggccttcacctgtgaacctgagactcaggacacaacctacctgtggtggataaacaatcagagcctcccggtcagtcccaggctgcagctgtccaatggcaacaggaccctcactctactcagtgtcacaaggaatgacacaggaccctatgagtgtgaaatacagaacccagtgagtgcgaaccgcagtgacccagtcaccttgaatgtcacctatggcccggacacccccaccatttccccttcagacacctattaccgtccaggggcaaacctcagcctctcctgctatgcagcctctaacccacctgcacagtactcctggcttatcaatggaacattccagcaaagcacacaagagctctttatccctaacatcactgtgaataatagtggatcctatacctgccacgccaataactcagtcactggctgcaacaggaccacagtcaagacgatcatagtcactgagctaagtccagtagtagcaaagccccaaatcaaagccagcaagaccacagtcacaggagataaggactctgtgaacctgacctgctccacaaatgacactggaatctccatccgttggttcttcaaaaaccagagtctcccgtcctcggagaggatgaagctgtcccagggcaacaccaccctcagcataaaccctgtcaagagggaggatgctgggacgtattggtgtgaggtcttcaacccaatcagtaagaaccaaagcgaccccatcatgctgaacgtaaactataatgctctaccacaagaaaatggcctctcacctggggccattgctggcattgtgattggagtagtggccctggttgctctgatagcagtagccctggcatgttttctgcatttcgggaagaccggcagctcaggaccactccaatgacccacctaacaagatgaatgaagttacttattctaccctgaactttgaagcccagcaacccacacaaccaacttcagcctccccatccctaacagccacagaaataatttattcagaagtaaaaaagcagtaatgaaacctgtcctgctcactgcagtgctgatgtatttcaagtctctcaccctcatcactaggagattcctttcccctgtaggggtagaggggtggggacagaaacaactttctcctactcttccttcctaataggcatctccaggctgcctggtcactgcccctctctcagtgtcaatagatgaaagtacattgggagtctgtaggaaacccaaccttcttgtcattgaaatttggcaaagctgactttgggaaagagggaccagaacttcccctcccttccccttttcccaacctggacttgttttaaacttgcctgttcagagcactcattccttcccacccccagtcctgtcctatcactctaattcggatttgccatagccttgaggttatgtccttttccattaagtacatgtgccaggaaacaagagagagagaaagtaaaggcagtaatgccttctcctatttctccaaagccttgtgtgaactcaccaaacacaagaaaatcaaatatataaccaatagtgaaatgccacacctttgtccactgtcagggttgtctacctgtaggatcagggtctaagcaccttggtgcttagctagaataccacctaatccttctggcaagcctgtcttcagagaacccactagaagcaactaggaaaatcacttgccaaaatccaaggcaattcctgatggaaaatgcaaaagcacatatatgttttaatatctttatgggctctgttcaaggcagtgctgagagggaggggttatagcttcaggagggaaccagcttctgataaacacaatctgctaggaacttgggaaaggaatcagagagctgcccttcagcgattatttaaattattgttaaagaatacacaatttggggtattgggatttttctccttttctctgagacattccaccattttaatttttgtaactgcttatttatgtgaaaagggttatttttacttagcttagctatgtcagccaatccgattgccttaggtgaaagaaaccaccgaaatccctcaggtcccttggtcaggagcctctcaagattttttttgtcagaggctccaaatagaaaataagaaaaggttttcttcattcatggctagagctagatttaactcagtttctaggcacctcagaccaatcatcaactaccattctattccatgtttgcacctgtgcattttctgtttgcccccattcactttgtcaggaaaccttggcctctgctaaggtgtatttggtccttgagaagtgggagcaccctacagggacactatcactcatgctggtggcattgtttacagctagaaagctgcactggtgctaatgccccttggggaaatggggctgtgaggaggaggattataacttaggcctagcctcttttaacagcctctgaaatttatcttttcttctatggggtctataaatgtatcttataataaaaaggaaggacaggaggaagacaggcaaatgtacttctcacccagtcttctacacagatggaatctctttggggctaagagaaaggttttattctatattgcttacctgatctcatgttaggcctaagaggctttctccaggaggattagcttggagttctctatactcaggtacctctttcagggttttctaaccctgacacggactgtgcatactttccctcatccatgctgtgctgtgttatttaatttttcctggctaagatcatgtctgaattatgtatgaaaattattctatgtttttataataaaaataatatatcagacatcga

SEQ ID NO: 35 - DNA, 1943 bp, Homo sapiens
acagagacctcgcaggccccgagaactgtcgcccttccacgatgtggctccgtgcctttatcctggccactctctctgcttccgcggcttgggggcatccgtcctcgccacctgtggtggacaccgtgcatggcaaagtgctggggaagttcgtcagcttagaaggatttgcacagcctgtggccattttcctgggaatcccttttgccaagccgcctcttggacccctgaggtttactccaccgcagcctgcagaaccatggagctttgtgaagaatgccacctcgtaccctcctatgtgcacccaagatcccaaggcggggcagttactctcagagctatttacaaaccgaaaggagaacattcctctcaagctttctgaagactgtctttacctcaatatttacactcctgctgacttgaccaagaaaaacaggctgccggtgatggtgtggatccacggaggggggctgatggtgggtgcggcatcaacctatgatgggctggcccttgctgcccatgaaaacgtggtggtggtgaccattcaatatcgcctgggcatctggggattcttcagcacaggggatgaacacagccgggggaactggggtcacctggaccaggtggctgccctgcgctgggtccaggacaacattgccagctttggagggaacccaggctctgtgaccatctttggagagtcagcgggaggagaaagtgtctctgttcttgttttgtctccattggccaagaacctcttccaccgggccatttctgagagtggcgtggccctcacttctgttctggtgaagaaaggtgatgtcaagcccttggctgagcaaattgctatcactgctgggtgcaaaaccaccacctctgctgtcatggttcactgcctgcgacagaagacggaagaggagctcttggagacgacattgaaaatgaaattcttatctctggacttacagggagaccccagagagagtcaaccccttctgggcactgtgattgatgggatgctgctgctgaaaacacctgaagagcttcaagctgaaaggaatttccacactgtcccctacatggtcggaattaacaagcaggagtttggctggttgattccaatgcagttgatgagctatccactctccgaagggcaactggaccagaagacagccatgtcactcctgtggaagtcctatccccttgtttgcattgctaaggaactgattccagaagccactgagaaatacttaggaggaacagacgacactgtcaaaaagaaagacctgttcctggacttgatagcagatgtgatgtttggtgtcccatctgtgattgtggcccggaaccacagagatgctggagcacccacctacatgtatgagtttcagtaccgtccaagcttctcatcagacatgaaacccaagacggtgataggagaccacggggatgagctcttctccgtctttggggccccatttttaaaagagggtgcctcagaagaggagatcagacttagcaagatggtgatgaaattctgggccaactttgctcgcaatggaaaccccaatggggaagggctgccccactggccagagtacaaccagaaggaagggtatctgcagattggtgccaacacccaggcggcccagaagctgaaggacaaagaagtagctttctggaccaacctctttgccaagaaggcagtggagaagccaccccagacagaacacatagagctgtgaatgaagatccagccggccttgggagcctggaggagcaaagactggggtcttttgcgaaagggattgcaggttcagaaggcatcttaccatggctggggaattgtctggtggtggggggcaggggacagaggccatgaaggagcaagttttgtatttgtgacctcagctttgggaataaaggatcttttgaaggccaaa

SEQ ID NO: 36 - DNA, 1914 bp, Homo sapiens
cttcggccttctatacctactgggcgggctcggatcccgtttccctggccccccacatctgtgattccctgctgaggcctctttaggctcagcagagacgttggaactgggctttccttgtggccccctttcctcgctccctgccctgggctgacgtcagttttatcttccttctccattcccttttgcctccttccccactcgctctcctcttaagatgtccaaattcttccttctcagccactttcaacccagagaaagcccgagtcccaaagcaacaggaagatgtgcgggggaccgcgagtgtggggacatcctgccgcctcgggcaactctgtcgtcccccacagggttcaggtgctcagaaaacagcagccactgagttcactgtttccgcaggccccgtattcccggccgtgctcagctgggcttgtggagtcgcgagcgggggcgctcctgcggcaccgcccctcctgggcagcccggcttccaggagagactcggcctcagtctccgaatggcaggggtctgggagaggatgtgatggcaaaggcctgcccctctcaggccgcctctagcaagttctctaccttgagagaagcgagtaggaggaggaaggaggccaggctgagccatctctgaggaatgtggctttggcaggacatccagtgctgccccgctcctccctcagtcccgcccagggccctggagccgggccgggctcctcctcctccaggggaagggctcggggcaggaatcccttccctttccccaccccagaagaagccccagagcgtagggatatgcgtacggcagaaagggagacagaaggcagggctagagaaagggaacaggagaaaagagcttcgacaagccaactgcccttcgctcaggccccagcggaaaggcgcagatacccggagacttcccagagagactcgacccaccaaaaagcgcaccgcggccgcgcagcccttccttcagctctggaacccagcgccccacacctcaaatgggagaactggtgacctctagtggcccatgaccagcctgcagggcctggggctggcggggattctctgacccaaactctcctgggctctaatgctgttcccctgcccaccctaccttctgccttcacactgctgaggggtccatagccgacaaggaagagctcatttctcatttgtcatgaccatctttaataaaaaataaattagttctgggtgggaaccatttcaggaggcagggagtggggctaggggctgggcggggtggtgggggagcggatgctcacatttctctttttcaccctctgcccagctgggccttgctctggagaggcagtctctttcctcctgccttcctgagtaaggcaggattggcagtggctgaccccagccctagctaattagggaggcaggggcagagatactaggcaaatgagaaggggtcagagacacagggcggcttagaagatgtgaggtctgaacatgagaaatgaggcttagggcacaaaactggagttggtggggagaccacactctaagtagctcagattagcaaggaactgcagacttgctttcctttccacctaggaaagtctcaaggaaacaggtcttgtccttctcagtctgtgtaacctctttttgaaaagtgatacacgtttgagcacacacatatccatgcagtcccaaaagcacacctgaggcatatgtgcacacacccatcacaccaccacatgggcctgaccacagccctgaaagtcactttgtgtcagtcaccttgccaccctctgtcacctggaggacatccctgctgagactgggacaggctggagagccagggggttcagagtgggccgatcaatgggtgaccgatggtggcacagaaaaccgtgaaggtgccccggac

SEQ ID NO: 37 - DNA, 1140 bp, Homo sapiens
gattttcttccgccatccggctaaatagtcccatgtgcactttgttccatggataaataaacactaggaacgcatttccaccctagatttcagcagaaatgctgaatgtaaaggaatatttgagtaaagtgagttgccgttcttgaagcccgtctcctaaggattctcccggtgtccgcgtagggatctcatgctatataggagggccctgccaggcaccgtctcctctctccggtccgtgcctccaagatgacaaagaaaagaaggaacaatggtcgtgccaaaaagggccgcggccacgtgcagcctattcgctgcactaactgtgcccgatgcgtgcccaaggacaaggccattaagaaattcgtcattcgaaacatagtggaggccgcagcagtcagggacatttctgaagcgagcgtcttcgatgcctatgtgcttcccaagctgtatgtgaagctacattactgtgtgagttgtgcaattcacagcaaagtagtcaggaatcgatctcgtgaagcccgcaaggaccgaacacccccaccccgatttagacctgcgggtgctgccccacgtcccccaccaaagcccatgtaaggagctgagttcttaaagactgaagacaggctattctctggagaaaaataaaatggaaattgtacttaatattgcatgttaagtgtatctgtgccagataaggtggggattttgtgtgttagaccaagtgtgaagtgacacacattattttcatggggaagaaagcttattcatgtaatttaatttttttcttttttttttttttttttttgagacggagtctttgtcgcccaagctgaattgcagtggcgtgatctcagctcactgcaacctccgtctcccgggttcaagtgattctcctgcctcagcttcttgagtagctgggattacaggtgtctgccaccatgcctggttaatttttgtatttttggtagagatggggtttcactatgttgtccaggctggtcttgaacttctgacctcagttaatccaccagccttggcctcccaaagtgctgggattacaggcttgagccacctcgcctagctatttatgtaaattaaactttaattgtggtcgtatggttggcctcacaattcgca

SEQ ID NO: 38 - DNA, 2892 bp, Homo sapiens
gctagtcaccggcccctgctcaagaatgccagtgtgtgtgtagcctccacagagaggtcgttttctcggagtccagaggggccgcctgagcttctgagaactagggaggagccatcccagccatgagcccctgtgggaatctgctgggggccaagtggcctggagtcctcaggctcccgcagctgctccggagggagaggtgagctcagggcagcctgcctgcagccagaggtgccgggagccccgggcctgtcatggtggccatctacagccggcctgaggcagtcacagacggatttgcagctgagcctgtctatctggtgtgggaagaagatggggagttacttgtcagtcccggcttacttcacctccagagacctgtttcggtgttcagaatgccaggattccctcaccaactggtactatgagaaggatgggaagctctactgccccaaggactactgggggaagtttggggagttctgtcatgggtgctccctgctgatgacagggccttttatggtggctggggagttcaagtaccacccagagtgctttgcctgtatgagctgcaaggtgatcattgaggatggggatgcatatgcactggtgcagcatgccaccctctactgtgggaagtgccacaatgaggtggtgctggcacccatgtttgagagactctccacagagtctgttcaggagcagctgccctactctgtcacgctcatctccatgccggccaccactgaaggcaggcggggcttctccgtgtccgtggagagtgcctgctccaactacgccaccactgtgcaagtgaaagaggtcaaccggatgcacatcagtcccaacaatcgaaacgccatccaccctggggaccgcatcctggagatcaatgggacccccgtccgcacacttcgagtggaggaggtggaggatgcaattagccagacgagccagacacttcagctgttgattgaacatgaccccgtctcccaacgcctggaccagctgcggctggaggcccggctcgctcctcacatgcagaatgccggacacccccacgccctcagcaccctggacaccaaggagaatctggaggggacactgaggagacgttccctaaggcgcagtaacagtatctccaagtcccctggccccagctccccaaaggagcccctgctgttcagccgtgacatcagccgctcagaatcccttcgttgttccagcagctattcacagcagatcttccggccctgtgacctaatccatggggaggtcctggggaagggcttctttgggcaggctatcaaggtgacacacaaagccacgggcaaagtgatggtcatgaaagagttaattcgatgtgatgaggagacccagaaaacttttctgactgaggtgaaagtgatgcgcagcctggaccaccccaatgtgctcaagttcattggtgtgctgtacaaggataagaagctgaacctcctgacagagtacattgaggggggcacactgaaggactttctgcgcagtatggatccgttcccctggcagcagaaggtcaggtttgccaaaggaatcgcctccggaatggcctatttgcactctatgtgcatcatccaccgggatctgaactcgcacaactgcctcatcaagttggacaagactgtggtggtggcagactttgggctgtcacggctcatagtggaagagaggaaaagggcccccatggagaaggccaccaccaagaaacgcaccttgcgcaagaacgaccgcaagaagcgctacacggtggtgggaaacccctactggatggcccctgagatgctgaacggaaagagctatgatgagacggtggatatcttctcctttgggatcgttctctgtgagatcattgggcaggtgtatgcagatcctgactgccttccccgaacactggactttggcctcaacgtgaagcttttctgggagaagtttgttcccacagattgtcccccggccttcttcccgctggccgccatctgctgcagactggagcctgagagcagagccccccccggggccgcaggagagggcccgggctgcgcggatgatgagggcccagtgaggcgccaagggaaggtcaccatcaagtatgaccccaaggagctacggaagcacctcaacctagaggagtggatcctggagcagctcacgcgcctctacgactgccaggaagaggagatctcagaactagagattgacgtggatgagctcctggacatggagagtgacgatgcctgggcttccagggtcaaggagctgctggttgactgttacaaacccacagaggccttcatctctggcctgctggacaagatccgggccatgcagaagctgagcacaccccagaagaagtgagggtccccgacccaggcgaacggtggctcccataggacaatcgctaccccccgacctcgtagcaacagcaataccgggggaccctgcggccaggcctggttccatgagcagggctcctcgtgcccctggcccaggggtctcttcccctgccccctcagttttccacttttggatttttttattgttattaaactgatgggactttgtgtttttatattgactctgcggcacgggccctttaataaagcgaggtagggtacgcctttggtgcagctcaaaaaaaaaaaaaaaaatgatttccagcggtccacattagagttgaaattttctggtgggagaatctataccttgttcctttataggccaaggaccgcagtccttcagtaacaccagtgtaaaagcttgaggagaaattgtgaagctacacagtatttgttttctaatacctcttgtcattctaaatatctttaatttattaaaaaatatatatatacagta

SEQ ID NO: 39 - DNA, 4291 bp, Homo sapiens
gctgtccggctcccgggctgtcctcagcaagggcgcggtctggtactcgtgcgtcttttatcgcctcagtttccctccgccgactagcgcgcggggcccggttctccatcgcgcgcacggcagcctagcgcaatgaggcgggcagcactgcggctttgtgccttgggcaaagggcagcttactcctggaagaggactgactcaaggaccccagaaccccaagaaacagggaatcttccacattcatgaagttcgagataagttgcgggagatagtaggagcatccacaaactggagagaccatgtgaaggcaatggaagaaaggaaattacttcatagtttcttggctaaatcacaggatggactgcctcctaggagaatgaaggacagttatattgaagttctcttgcctttgggcagtgagcctgaattacgagagaaatatttgactgttcaaaacaccgtaagatttggcaggattcttgaggatcttgacagcttgggagttcttatttgttacatgcacaacaaaatccactccgccaagatgtctcctttatcgatagttacagccctggtggataagattgatatgtgtaagaagagcttgagcccagaacaggacattaagttcagtggccatgttagctgggtcgggaagacatccatggaagtgaagatgcaaatgttccagttacatggtgatgaattttgtcctgttttggatgcaacatttgtaatggtggctcgtgattctgaaaataaagggccggcatttgtaaatccactcatccctgaaagcccagaggaagaggagctctttagacaaggggaattgaacaaggggagaagaattgccttcagctccacgtcgttactgaaaatggcccccagcgctgaggagaggaccaccatacatgagatgtttctcagcacactggatccaaagactataagttttcggagtcgagttttaccctctaatgcagtgtggatggagaattcaaaactgaagagtttggaaatttgccaccctcaggagcggaacattttcaatcggatctttggtggtttccttatgaggaaggcatatgaacttgcgtgggctactgcttgtagctttggtggttctcgaccgtttgtggtagcagtagatgacatcatgtttcagaaacctgttgaggttggctcattgctctttctttcttcacaggtatgctttactcagaataattatattcaagtcagagtacacagtgaagtggcctccctgcaggagaagcagcatacaaccaccaatgtctttcatttcacgttcatgtcggaaaaagaagtgccattggttttcccaaaaacatatggagagtccatgttgtacttagatgggcagcggcatttcaactccatgagtggcccagcgaccttgagaaaggactaccttgtggagccctaagaacaccacatttgttgaaaactagcactctacccacagtgacgtggtatctgatgaagacctgatcgagtgtattgattttagtattgcttcgtgtcctccacacaggaggaggatgtattcagcctttaggatgatcagaaaagcagaaagagagagtggccggatggggctgaggggagaaagaattattaaacaataaatactttcaagacaattttaattgtgaacctaccatgttgcctcccatcttctgaaaaaacaaaaaaattgagaggctgggcgtggtggctcatgcctataatcccagcactttgggaggctgaggcgggcggatcatgaagtcaggagatcaagaccatcctggccaacatggtgaaaccctgtctctactaaaaatacagaaaattagccgtggtggcatgtgcctgtagtcccagctacttgggaggctgaggcaggagaattgcttgaacccaggaggtggaggttgcagtgagctgagattgcaccattgcactccagcctgggcgacagagagagactgtctcaaaaattaattaattaattaattaattgaggataccattggatgcattcttttcttacacatattgcaactgtcagtatacaaggtttcctgccagggtatttggatgacgttctttaaacctaaccacttgctctgtgctgtctaaatcccatcagccgtacatgattcctttgcttccctctatttcccagcttttgttgtcagagggtagatgaaaagttggggcgaagggatttaacaaaagttactgcatccgtaaagatttgtgggaagatttaggtctgaaaccataccattagaaggtgtttagagatgatctagataaggaaatacaggaccatttggtcattctttcattcaccagacagctatttagcacattctgctagtggctccgcaggatatatctgatttaaaaaataggaaccacaataataatagctgcttatgcttatggagcattgccatgtgctagataggcaccatcctcagcccttggcaggtctgagctcctttatttcttccaatcaacactatgaggcaggttctgtaaccccccttagggttaggccactcgggaaactgaagcacagagagtttaagtaacttcctggaggtccgacgcgtaacatgtggaggtgctgggattcaaaaccaggcaatgtgggtcccgggcactcttgaccagtgcctgtacttcttccaaggaatagagcaagggaggtcataccgaatatcacagtgtcacctaggaagcccaagggaggtattcccgttaatctgcagccaaggccgggcgcggtagctcatgcctgtaatcccagcactttgggaggccaaggcggatggatcatgaggtcaggagttcaagaccagcctggccgagatggtgaaaccccgtttctactaaaaatacaaaaattagccgggcgtggtggcggacgcctgtaatcccagctactcgggaggctgaggcagagaactgcttgaacctgggaggcagaggttgcagtgagctgtgatcatgccactgcactccagcctgggtgacagaacgagactccatctcaaaaaaaaaaaaaaaaaaaaatctgtagccaagaccgttccttttttgacaggaaggtaacttagaagaaaaaataatctctgaaaaaagtcctcccaagaaggaagcaatatttattgtgggttctacattagtgttcacaaacttggctctgcctcagaattaggtggaaagtatttttgtgtgtgtgtgtgtgtgtgagacagagtttcactctgtcgctccagctggagtgcagtggcatgatcttggctcactgcaacctctacctcccgggttcaagcgattctcctgcctcagcctcctgagtagctaggattacaggtgtcagcccccatgcctggctagtttttgtatttttagtagaaaggcggtttcaccatgttggccagctggtctcaaattcctgacctcaggtgatccacctaccttggcctcccaaagtgctgggattataggcatgagccactgcacccggccggtggaaagcatttttaacaaaaaatttttaggccaggcacagtggtggctcatgcctgtaatcccagcactttgggagactgagatgggaggatcgcttgagaccagcctgggaaacatagtgagaccctttctctacaaaaagttaaaaaattatctgagcatggtggtgtgcacctgtagtcccagttaggaggctgaggtgagtggattgcttgagtccaggagtttgagtctgcagtgagctatgatcatgccactgcactccagtctgggtgacagcaagaccctgtctcaagcaatttttttatattagtttatgtaatgtttattgaaatcacagtgtcaacaagcacctctggcatgaaatagtcacaggagcgaacacaactatctcttggaagcatgcagtttgactcatggaatcaagcatgtgctgtactataataacttgtctctccatgccgtaatgccatcctgactgagatttacctggcccttcaatatagcattttgcatatctacctatgacatgatgggaggtggctaatggggagggatgcgccctggggagttttgtgaatgtgttaagtggagttaagagacctactgcatgctattgtatagattatacattatatatttaaccatttgttgctgtacagtgaagctttttctagtatttcttttttgctattataaacaatgttgcagtaaatatcctaaatactctaaaa

SEQ ID NO: 40 - DNA, 2306 bp, Homo sapiens
ggggcctgccacgaggccgcagtataaccgcgtggcccgcgcgcgcgcttccctcccggcgcagtcaccggcgcggtctatggctgcgacttctctaatgtctgctttggctgcccggctgctgcagcccgcgcacagctgctcccttcgccttcgccctttccacctcgcggcagttcggggaatctctccctaggtcaggttggagtgcagtgctgcaatcacggcttactgcagccttgacctcctgggctcaagtgatcctcccacctcagcttaaatgaagctgttgtcatttctggaaggaaactggcccagcagatcaagcaggaagtgcggcaggaggtagaagagtgggtggcctcaggcaacaaacggccacacctgagtgtgatcctggttggcgagaatcctgcaagtcactcctatgtcctcaacaaaaccagggcagctgcagttgtgggaatcaacagtgagacaattatgaaaccagcttcaatttcagaggaagaattgttgaatttaatcaataaactgaataatgatgataatgtagatggcctccttgttcagttgcctcttccagagcatattgatgagagaaggatctgcaatgctgtttctccagacaaggatgttgatggctttcatgtaattaatgtaggacgaatgtgtttggatcagtattccatgttaccggctactccatggggtgtgtgggaaataatcaagcgaactggcattccaaccctagggaagaatgtggttgtggctggaaggtcaaaaaacgttggaatgcccattgcaatgttactgcacacagatggggcgcatgaacgtcccggaggtgatgccactgttacaatatctcatcgatatactcccaaagagcagttgaagaaacatacaattcttgcagatattgtaatatctgctgcaggtattccaaatctgatcacagcagatatgatcaaggaaggagcagcagtcattgatgtgggaataaatagagttcacgatcctgtaactgccaaacccaagttggttggagatgtggattttgaaggagtcagacaaaaagctgggtatatcactccagttcctggaggtgttggccccatgacagtggcaatgctaatgaagaataccattattgctgcaaaaaaggtgctgaggcttgaagagcgagaagtgctgaagtctaaagagcttggggtagccactaattaactactgtgtcttctgtgtcacaaacagcactccaggccagctcaagaagcaaagcaggccaatagaaatgcaatatttttaatttattctactgaaatggtttaaaatgatgccttgtatttattgaaagcttaaatgggtgggtgtttctgcacatacctctgcagtacctcaccagggagcattccagtatcatgcagggtcctgtgatctagccaggagcagccattaacctagtgattaatatgggagacattaccatatggaggatggatgcttcactttgtcaagcacctcagttacacattcgccttttctaggattgcatttcccaagtgctattgcaataacagttgatactcattttaggtaccaaaccttttgagttcaactgatcaaaccaaaggaaaagtgttgctagagaaaattagggaaaaggtgaaaaagaaaaaatggtagtaattgagcagaaaaaaattaatttatatatgtattgattggcaaccagatttatctaagtagaactgaattggctaggaaaaaagaaaaactgcatgttaatcattttcctaagctgtccttttgaggcttagtcagtttattgggaaaatgtttaggattattccttgctattagtactcattttatgtatgttacccttcagtaagttctccccattttagttttctaggactgaaaggattcttttctacattatacatgtgtgttgtcatatttggcttttgctatatactttaacttcattgttaaatttttgtattgtatagtttctttggtgtatcttaaaacctatttttgaaaaacaaacttggcttgataatcatttgggcagcttgggtaagtacgcaacttacttttccaccaaagaactgtcagcagctgcctgcttttctgtgatgtatgtatcctgttgacttttccagaaattttttaagagtttgagttactattgaatttaatcagactttctgattaaagggttttctttcttttttaataaaacacatctgtctggtatggtatgaatttctgaaaaaaaaaaaaaaaaaaaaaaa

SEQ ID NO: 41 - DNA, 7685 bp, Homo sapiens
agtcccagcggcgcagccacccatgcgcgcgcgctcgcaagaccaccagcgcccagagccccagtctgaggcttggcgccgggggtctgcgggcgaggggagctctctacgtgcgaggggctagcgggagccggcacaagagggtcgaggagccaggaaccccaaacgtccggcgccaggcgctagccaagctgctgcgcgccccggcgcccagctggctcggggacagccgctgggtgtcggagaccggagctagcggattgcagcggaaaagcaaagatgtcacactggatccttggcctccagggtccattaaggtgagaataagatctctgggctggctggaactagcctaagactgaaaagcagccatggacatggcggatgagccactcaatggaagccacacatggctatccattccatttgacctcaatggctctgtggtgtcaaccaacacctcaaaccagacagagccgtactatgacctgacaagcaatgcagtcctcacattcatctattttgtggtctgcatcattgggttgtgtggcaacacacttgtcatttatgtcatcctccgctatgccaagatgaagaccatcaccaacatttacatcctcaacctggccatcgcagatgagctcttcatgctgggtctgcctttcttggctatgcaggtggctctggtccactggccctttggcaaggccatttgccgggtggtcatgactgtggatggcatcaatcagttcaccagcatcttctgcctgacagtcatgagcatcgaccgatacctggctgtggtccaccccatcaagtcggccaagtggaggagaccccggacggccaagatgatcaccatggctgtgtggggagtctctctgctggtcatcttgcccatcatgatatatgctgggctccggagcaaccagtgggggagaagcagctgcaccatcaactggccaggtgaatctggggcttggtacacagggttcatcatctacactttcattctggggttcctggtacccctcaccatcatctgtctttgctacctgttcattatcatcaaggtgaagtcctctggaatccgagtgggctcctctaagaggaagaagtctgagaagaaggtcacccgaatggtgtccatcgtggtggctgtcttcatcttctgctggcttcccttctacatattcaacgtttcttccgtctccatggccatcagccccaccccagcccttaaaggcatgtttgactttgtggtggtcctcacctatgctaacagctgtgccaaccctatcctatatgccttcttgtctgacaacttcaagaagagcttccagaatgtcctctgcttggtcaaggtgagcggcacagatgatggggagcggagtgacagtaagcaggacaaatcccggctgaatgagaccacggagacccagaggaccctcctcaatggagacctccaaaccagtatctgaactgcttggggggtgggaaagaaccaagccatgctctgtctactggcaatgggctccctacccacactggcttcctgcctcccacccctcacacctggcttctagaatagaggattgctcagcatgagtccaattcagagaacggtgtttgagtcagcttgtctgattgaatgataatgtgctaaattgattacctcccccttaaagcgaacactgaaatgcaggtagacaattcaaagtctggagaagagggatcatgcctggatatgatctttagaaacaacaaaaatagaaaaaaataagtatctgtgtgtttgtgtattgaaaactcaatatgtaatcttgtgtttttatatgtatacttgtatattcctatttattctctgtataggcattacctacgttcctgtgtttacatacacaagtagcaaattcgagtatgcatagtgtagatggacatttgccacaacacactgcccgcagaaatggacttaccgtgaagccaataaagttcaagcttcagggatctctcttgcacgggccttgccaaggcccaggagggacttgggcagtatgttcatgtggtcatatgtttttgtaaaaaattgtgaaagtaagatatgtttgtattgtttttcttaaagaggaacctcgtataagcttcaagcctcacaaaccttctagcctctgcccttggggatttgcttcattaatttcaggcaagtgaggtcaatgtaagaagggaaagggagaagatatttgaagaaccagaatgtaaattcatgtgtttccacttctcagatatagtcagagaattattcatttgcccaaaaggacttaagtggttgtggtcatccatcattgtatttatcaagacaaagccaactttgttataagattgcatttttttcttttcaaattgctttagtttttcttagggagctatgagggggaaaaatcactaacatgaaaggcaaaaaatggactatgattcctgtggggaaacaatttcattctctccatcgtgaaaataagtgaataagagtgaagcaaaattacacctttatgagaaaccataaaattgtttttatttttcaggccagacatagcttcctaatgaaagaaaatggaaatgtaattcgacgactcctcaaaggggactttagaggacttcatacaaagctgggcattaagaaaaccacaatgcatggccgggcgtggtggcttacacctgtaatcccagcactttgggaggccgaggtgggtggatcacccgaggtcaggagttcgagaccagcctggccaacatggtgaaaccccatcactactaaaaatatgtaaattagtcgggcgtggtgtcacgtgcctgtaatcctagctgctcgggaggctgaggcaggagaatcacttgaacttgggaggtggaggttgcagtaagctgagattgtgccactgcactctagcctgagcaacaagagcaaaactcagtctcaaaaaaaaaaaaaaaaaaaaaaaaaaaaaaaaaaaaggaaaaccacaatgcgtactaaagaccagaagacattgttcacaaaacaaaagcaccctcacctgccaatgaatatgcagcgtgcagggggtgtggtgtgagtgttggtggggccccacctctcggagatactgctgtgctgccttcctcactgactgtatacatagtaactgtcatatctttaatgccatggactcactgagccgctctgcaaggactattgtagacaggcacttcacaccataaagtggcatttttttcgttccccaaactgacatttacaagcgataagaaaagagacaatatccatttcattgactgatcattttctagagtatgaagaaatacacacctgggtgtctgcaaggatgtcatcatctttgggtttcatctgagagcatcactcagcatctcacacatagatgttaccatatttttaaatgagctttcctcatccggctccctaagcaagcgctgttggccggtgggagtgactaagtgctccacctgtgggtgtccttcttaatgtgctgcttttgttctgtataaattcacaccacctcactcccaaaagtacttcctgtggctcagaaaaatatgttcaataagattttggatagataaatccatacaaaaataaaaagaggtatagttataaaacaagactacagaaaaagttgtggcagaaattgcatgcaggaaaatcccacaccattagtaaaagtaaggtcaactgtaagttcagctcagggcttcctagcagccatgtttagcgaagtgtgatttttttttttaaacaaaaacaagcaaagatttggaagaaaatgctttagacctaactttacaattattataacataagatgttccagggtccttgaataaatgctgagttttagggaaatgattccaagggaccaagaattggtagaaataatttcaaggcagagaagactaattctacaggccgggcgtggtggcttatgcctgtaatcccacactttgggaggctgaggtgggtggattgcctgaggtcaagagttcaagaccagcctggccaacatggtgaaaccctgtctctactaaaaatacaaaaaattacccaggcatggtggcgggcgcctgtaatcccagctacttgggaggctgagacaggagaatggcttgaacccaggaggtggagattgcggtgagctgagatcgtgccattgcactccagcctgggcaacaagagcgaaacttcatctcaaaaaaaaaaaacaaagactaattctatagtacccatgaccctgcaaccagagaaactgcctgtagggaggccagagtccaaagcagccacctgtaacctgaaaatgaaacgcagacccaggcatctgtgggtcttcatcagcaggatgaccattctaaggctaaaagacaggcctttaaatctgatgctataattccatccaaatacacagttaggtttctaccatagggaaagctattctctactttttgaagtatctgtttcaaagataacttgctctctggttctcttttatctaaaagagagaatcaacatgctaatttaaaggttaacatcattttaattcaaaaattttagtctccattccatatttaatgatgaagacaaatctgctgggtgctgggagggaataaaaagtaatgcaccccattgatttcagagtatctgatcacttgggttatgcaagctgctacttacccgccattagcatgggtagttaagtgctgattaaacctaagtggactcagtgaaaaagatattgggaaaaataatatgatattgtggcctatgttgaatgatgttagcttgtgtttcagtaacagagttgggtaatactggacgtgtagatgaagctttagcagggctgggcacggtggctcatgcctgtaatcccagcactttgggaggctgaggcgggtggattacctgaggtcaggagttcaagaccagcctggccaacatggggaaaccctgtctctactaagaatacaaaaattagctgggtgtggtggcgtgtgcctgtaatcccagctactcaggaggctgagacaggagaatcgcttgaacccgggaggcgaaggttgcagtgagccaagatcgcgccactgcacttcagcctgggtgacagcacaagactccatctcaaaaaaaaaaaaaaaaggaagaagaaaaagaaacttaagtggggttcatacatagcatggcagagggacactggagaataaaatggcatgcagagaggaacacgcgggccagtggatgaggcttctagacctggcagtgaactggagtctatttgcttacacaaatttaaccttctctccatgatggaatacaagtgtttcttgccaaaactcgcagccccagctgccctagatgaggagcaccgtgctggaaaagtgcacaggctgatcacagagacaggtaggaagcaatggactgttaaaatgcatgttccgggctggggatggtggctcacacctgtgatctcagcactttgggaggccgaggctggggaatcgcttgagcccaggattttgagactagcctaggcaatatggtgagaccctgcccttaaaaaaaaaaaagaaaagaaaagaaaagaaaaaaagattcatattcctgatcagctctgaatgtgactattcaatgaagacagtaaagttacagtgtaaggcacacatgacctttggccttgctaaagaagagtggctgaaggtctagcaaattaatgcttgtcttaggttacctgttgatttaaaaacaacaacaacaaaaacccataaaaatagtaaaatataaaaacaaattagtgttttatagaccctggggaaaagaattttcagcaaagtacaaaaatttaaagcattcctttctttaattttgtaattctttactgtagaacagctcaaaatatcagttctgttttaagtaacagaattgataactgagcagggaaacgtaatttggattgtaaaattcttgctttaataaaaattctttaaacagtcaaaatagaaagaaagaaagaaaggtggcaagagaattatcaaaagtttccatagatggttgggaagatctgattagtgtttccaaaatgcttatcattctaagaatcccaatagctggcaagccaagcagtggaacttatagtaacaacaatcaatcacttgtctcatcccacatttttgccaaattcaaaaacaccaaatttcccatcaaatgttctgtcagagtaaacctttacctaagtgcttgttttgcttttaatatgtgaatttctgggaacattcccatgggcagcctctaattttttttttttttttttgagacagagtttcgctttttcacccaggctggagcgcagtggcacgatcttggctcactgcaacctccacctaccggattcaagtgattctcctgcctcagcctcccaagtagcagggactacaggcacgtgccaccacgcccagctaatttttgtatttttagtggagatgggtttttgccatgttggccaggcaggtcttgaactcttgacctcaggtgatccgcctgcctcagtgtcccaaagtgttgggattacaggcacgagccaccgcgctcagccaatttttcctcaactctctctttcctggacgggctgcgttggggggaggtgcagggaaagaacacctctttgcttagacattggtgtcgacagtggggatactaagttcatctcctgatcctgctaggcctggaagcaggaaagaaatgtcctggttagagataaaattgttctatccttttagaaaagcctgttaaggaatatgatgcaaagccaccttcgacgaaatctgaaatgataccccacagccttgtccaccccaattattcagtgacagggctccagttgcttaagccatagagaaggcccctttgcagtgggagtcactgaagacagaaagggaagcccaggatgaacccagtcctaagggctgctgggggccaccaaataagactgttttagccctggacacagagggagacacagtcatcccagatccttacaaagaatacattgccaaggaccccgaaggaaatctgcttgtcttaagagaggaagacccacgaccagctctctgggactacctgtcaactcagcaggtgcagccagggagcagccatgcttcttctgccctcccagtaggctgggctatcagttcctgggaggggtcctgtccccatgtaaggggatatgtacattgctgagtacgctgatatctttttcatgggtatgattttttaacaagaaagctaaatggttctcgtgtaacataactgatatagtttggctgtgtccccacccaaatcttatcttgaactgcagctcccataatccccaggtgttgtgggagggacccagtgggaggtaattgaatcatgggggtggttaccgccatgctgttctcgtgatagcgagtgagttctcacgagatctgatggttttataaggggctttccccctccttcgctctgcacttctccttgctgccatgcgaagaaggatgtgtttgcttccccttctgccatgattgtaagtttcctgaggcctccccagccatgttaaactttgagttaattaaacctctttcctttataaatta

SEQ ID NO: 42 - DNA, 5695 bp, Homo sapiens
aaccgacgcgcgtctgtggagaagcggcttggtcgggggtggtctcgtggggtcctgcctgtttagtcgctttcagggttcttgagccccttcacgaccgtcaccatggaagtgtcaccattgcagcctgtaaatgaaaatatgcaagtcaacaaaataaagaaaaatgaagatgctaagaaaagactgtctgttgaaagaatctatcaaaagaaaacacaattggaacatattttgctccgcccagacacctacattggttctgtggaattagtgacccagcaaatgtgggtttacgatgaagatgttggcattaactatagggaagtcacttttgttcctggtttgtacaaaatctttgatgagattctagttaatgctgcggacaacaaacaaagggacccaaaaatgtcttgtattagagtcacaattgatccggaaaacaatttaattagtatatggaataatggaaaaggtattcctgttgttgaacacaaagttgaaaagatgtatgtcccagctctcatatttggacagctcctaacttctagtaactatgatgatgatgaaaagaaagtgacaggtggtcgaaatggctatggagccaaattgtgtaacatattcagtaccaaatttactgtggaaacagccagtagagaatacaagaaaatgttcaaacagacatggatggataatatgggaagagctggtgagatggaactcaagcccttcaatggagaagattatacatgtatcacctttcagcctgatttgtctaagtttaaaatgcaaagcctggacaaagatattgttgcactaatggtcagaagagcatatgatattgctggatccaccaaagatgtcaaagtctttcttaatggaaataaactgccagtaaaaggatttcgtagttatgtggacatgtatttgaaggacaagttggatgaaactggtaactccttgaaagtaatacatgaacaagtaaaccacaggtgggaagtgtgtttaactatgagtgaaaaaggctttcagcaaattagctttgtcaacagcattgctacatccaagggtggcagacatgttgattatgtagctgatcagattgtgactaaacttgttgatgttgtgaagaagaagaacaagggtggtgttgcagtaaaagcacatcaggtgaaaaatcacatgtggatttttgtaaatgccttaattgaaaacccaacctttgactctcagacaaaagaaaacatgactttacaacccaagagctttggatcaacatgccaattgagtgaaaaatttatcaaagctgccattggctgtggtattgtagaaagcatactaaactgggtgaagtttaaggcccaagtccagttaaacaagaagtgttcagctgtaaaacataatagaatcaagggaattcccaaactcgatgatgccaatgatgcagggggccgaaactccactgagtgtacgcttatcctgactgagggagattcagccaaaactttggctgtttcaggccttggtgtggttgggagagacaaatatggggttttccctcttagaggaaaaatactcaatgttcgagaagcttctcataagcagatcatggaaaatgctgagattaacaatatcatcaagattgtgggtcttcagtacaagaaaaactatgaagatgaagattcattgaagacgcttcgttatgggaagataatgattatgacagatcaggaccaagatggttcccacatcaaaggcttgctgattaattttatccatcacaactggccctctcttctgcgacatcgttttctggaggaatttatcactcccattgtaaaggtatctaaaaacaagcaagaaatggcattttacagccttcctgaatttgaagagtggaagagttctactccaaatcataaaaaatggaaagtcaaatattacaaaggtttgggcaccagcacatcaaaggaagctaaagaatactttgcagatatgaaaagacatcgtatccagttcaaatattctggtcctgaagatgatgctgctatcagcctggcctttagcaaaaaacagatagatgatcgaaaggaatggttaactaatttcatggaggatagaagacaacgaaagttacttgggcttcctgaggattacttgtatggacaaactaccacatatctgacatataatgacttcatcaacaaggaacttatcttgttctcaaattctgataacgagagatctatcccttctatggtggatggtttgaaaccaggtcagagaaaggttttgtttacttgcttcaaacggaatgacaagcgagaagtaaaggttgcccaattagctggatcagtggctgaaatgtcttcttatcatcatggtgagatgtcactaatgatgaccattatcaatttggctcagaattttgtgggtagcaataatctaaacctcttgcagcccattggtcagtttggtaccaggctacatggtggcaaggattctgctagtccacgatacatctttacaatgctcagctctttggctcgattgttatttccaccaaaagatgatcacacgttgaagtttttatatgatgacaaccagcgtgttgagcctgaatggtacattcctattattcccatggtgctgataaatggtgctgaaggaatcggtactgggtggtcctgcaaaatccccaactttgatgtgcgtgaaattgtaaataacatcaggcgtttgatggatggagaagaacctttgccaatgcttccaagttacaagaacttcaagggtactattgaagaactggctccaaatcaatatgtgattagtggtgaagtagctattcttaattctacaaccattgaaatctcagagcttcccgtcagaacatggacccagacatacaaagaacaagttctagaacccatgttgaatggcaccgagaagacacctcctctcataacagactatagggaataccatacagataccactgtgaaatttgttgtgaagatgactgaagaaaaactggcagaggcagagagagttggactacacaaagtcttcaaactccaaactagtctcacatgcaactctatggtgctttttgaccacgtaggctgtttaaagaaatatgacacggtgttggatattctaagagacttttttgaactcagacttaaatattatggattaagaaaagaatggctcctaggaatgcttggtgctgaatctgctaaactgaataatcaggctcgctttatcttagagaaaatagatggcaaaataatcattgaaaataagcctaagaaagaattaattaaagttctgattcagaggggatatgattcggatcctgtgaaggcctggaaagaagcccagcaaaaggttccagatgaagaagaaaatgaagagagtgacaacgaaaaggaaactgaaaagagtgactccgtaacagattctggaccaaccttcaactatcttcttgatatgcccctttggtatttaaccaaggaaaagaaagatgaactctgcaggctaagaaatgaaaaagaacaagagctggacacattaaaaagaaagagtccatcagatttgtggaaagaagacttggctacatttattgaagaattggaggctgttgaagccaaggaaaaacaagatgaacaagtcggacttcctgggaaaggggggaaggccaaggggaaaaaaacacaaatggctgaagttttgccttctccgcgtggtcaaagagtcattccacgaataaccatagaaatgaaagcagaggcagaaaagaaaaataaaaagaaaattaagaatgaaaatactgaaggaagccctcaagaagatggtgtggaactagaaggcctaaaacaaagattagaaaagaaacagaaaagagaaccaggtacaaagacaaagaaacaaactacattggcatttaagccaatcaaaaaaggaaagaagagaaatccctggtctgattcagaatcagataggagcagtgacgaaagtaattttgatgtccctccacgagaaacagagccacggagagcagcaacaaaaacaaaattcacaatggatttggattcagatgaagatttctcagattttgatgaaaaaactgatgatgaagattttgtcccatcagatgctagtccacctaagaccaaaacttccccaaaacttagtaacaaagaactgaaaccacagaaaagtgtcgtgtcagaccttgaagctgatgatgttaagggcagtgtaccactgtcttcaagccctcctgctacacatttcccagatgaaactgaaattacaaacccagttcctaaaaagaatgtgacagtgaagaagacagcagcaaaaagtcagtcttccacctccactaccggtgccaaaaaaagggctgccccaaaaggaactaaaagggatccagctttgaattctggtgtctctcaaaagcctgatcctgccaaaaccaagaatcgccgcaaaaggaagccatccacttctgatgattctgactctaattttgagaaaattgtttcgaaagcagtcacaagcaagaaatccaagggggagagtgatgacttccatatggactttgactcagctgtggctcctcgggcaaaatctgtacgggcaaagaaacctataaagtacctggaagagtcagatgaagatgatctgttttaaaatgtgaggcgattattttaagtaattatcttaccaagcccaagactggttttaaagttacctgaagctcttaacttcctcccctctgaatttagtttggggaaggtgtttttagtacaagacatcaaagtgaagtaaagcccaagtgttctttagctttttataatactgtctaaatagtgaccatctcatgggcattgttttcttctctgctttgtctgtgttttgagtctgctttcttttgtctttaaaacctgatttttaagttcttctgaactgtagaaatagctatctgatcacttcagcgtaaagcagtgtgtttattaaccatccactaagctaaaactagagcagtttgatttaaaagtgtcactcttcctccttttctactttcagtagatatgagatagagcataattatctgttttatcttagttttatacataatttaccatcagatagaactttatggttctagtacagatactctactacactcagcctcttatgtgccaagtttttctttaagcaatgagaaattgctcatgttcttcatcttctcaaatcatcagaggccgaagaaaaacactttggctgtgtctataacttgacacagtcaatagaatgaagaaaattagagtagttatgtgattatttcagctcttgacctgtcccctctggctgcctctgagtctgaatctcccaaagagagaaaccaatttctaagaggactggattgcagaagactcggggacaacatttgatccaagatcttaaatgttatattgataaccatgctcagcaatgagctattagattcattttgggaaatctccataatttcaatttgtaaactttgttaagacctgtctacattgttatatgtgtgtgacttgagtaatgttatcaacgtttttgtaaatatttactatgtttttctattagctaaattccaacaattttgtactttaataaaatgttctaaacattgcaa

SEQ ID NO: 43 - DNA, 1608 bp, Homo sapiens
ggcgtgcggcgccgttgcgggcgggagcggctgcaacgccggtgcctgaggagcgatgccgagggaaatcatcaccctacagttgggccagtgcggcaatcagattgggttcgagttctggaaacagctgtgcgccgagcatggtatcagccccgagggcatcgtggaggagttcgccaccgagggcactgaccgcaaggacgtctttttctaccaggcagacgatgagcactacatcccccgggccgtgctgctggacttggaaccccgggtgatccactccatcctcaactccccctatgccaagctctacaacccagagaacatctacctgtcggaacatggaggaggagctggcaacaactgggccagcggattctcccagggagaaaagatccatgaggacatttttgacatcatagaccgggaggcagatggtagtgacagtctagagggctttgtgctgtgtcactccattgctggggggacaggctctggactgggttcctacctcttagaacggctgaatgacaggtatcctaagaagctggtgcagacatactcagtgtttcccaaccaggacgagatgagcgatgtggtggtccagccttacaattcactcctcacactcaagaggctgacgcagaatgcagactgtgtggtggtgctggacaacacagccctgaaccggattgccacagaccgcctgcacatccagaacccatccttctcccagatcaaccagctggtgtctaccatcatgtcagccagcaccaccaccctgcgctaccctggctacatgaacaatgacctcatcggcctcatcgcctcgctcattcccaccccacggctccacttcctcatgaccggctacacccctctcactacggaccagtcagtggccagcgtgaggaagaccacggtcctggatgtcatgaggcggctgctgcagcccaagaacgtgatggtgtccacaggccgagaccgccagaccaaccactgctacatcgccatcctcaacatcatccagggagaggtggaccccacccaggtccacaagagcttgcagaggatccgggaacgcaagttggccaacttcatcccgtggggccccgccagcatccaggtggccctgtcgaggaagtctccctacctgccctcggcccaccgggtcagcgggctcatgatggccaaccacaccagcatctcctcgctcttcgagagaacctgtcgccagtatgacaagctgcgtaagcgggaggccttcctggagcagttccgcaaggaggacatgttcaaggacaactttgatgagatggacacatccagggagattgtgcagcagctcatcgatgagtaccatgcggccacacggccagactacatctcctggggcacccaggagcagtgagtcccccaggacagggaccctcatctgccttactggttggcccaagccctgcctgactgaccaccccctcagagcacagatcagggacctcacgcatctctttctcatatacatggactctctgttggcctgcaaacacatttacttctcctcttatgagactatttatctttaataaagcactggatataaatcaa

SEQ ID NO: 44 - DNA, 3202 bp, Homo sapiens
actgtcgctccggacacttcctcctgggccgccgccgccgccgccgacttaaactttggagggggaaaaagagctactggcgcctggcgaccctccctgccccccacccaaccccgctccggcaacgcccccttcctcacggctcccgaccgaacttttctccaacttctgcgactcgaccccgccatcctcaggtcccctccgcctgccagatcttttctcggatccccgctctcccaccacctgctcacgagatcccgcggatctagaacccagggtcccccggggccccccggccgggtcccgggtgggctccaggcggccggtccccggcctccccccatggccaccgccccctcttatcccgccgggctccctggctctcccgggccggggtctcctccgccccccggcggcctagagctgcagtcgccgccaccgctactgccccagatcccggccccgggttccggggtctcctttcacatccagatcgggctgacccgcgagttcgtgctgttgcccgccgcctccgagctggctcatgtgaagcagctggcctgttccatcgtggaccagaagttccctgagtgtggcttctacggcctttacgacaagatcctgcttttcaaacatgaccccacgtcggccaacctcctgcagctggtgcgctcgtccggagacatccaggagggcgacctggtggaggtggtgctgtcggcctcggccaccttcgaggacttccagatccgcccgcacgccctcacggtgcactcctatcgggcgcctgccttctgtgatcactgcggggagatgctcttcggcctagtgcgccagggcctcaagtgcgatggctgcgggctgaactaccacaagcgctgtgccttcagcatccccaacaactgtagtggggcccgcaaacggcgcctgtcatccacgtctctggccagtggccactcggtgcgcctcggcacctccgagtccctgccctgcacggctgaagagctgagccgtagcaccaccgaactcctgcctcgccgtcccccgtcatcctcttcctcctcttctgcctcatcgtatacgggccgccccattgagctggacaagatgctgctctccaaggtcaaggtgccgcacaccttcctcatccacagctatacacggcccaccgtttgccaggcttgcaagaaactcctcaagggcctcttccggcagggcctgcaatgcaaagactgcaagtttaactgtcacaaacgctgcgccacccgcgtccctaatgactgcctgggggaggcccttatcaatggagatgtgccgatggaggaggccaccgatttcagcgaggctgacaagagcgccctcatggatgagtcagaggactccggtgtcatccctggctcccactcagagaatgcgctccacgccagtgaggaggaggaaggcgagggaggcaaggcccagagctccctggggtacatccccctaatgagggtggtgcaatcggtgcgacacacgacgcggaaatccagcaccacgctgcgggagggttgggtggttcattacagcaacaaggacacgctgagaaagcggcactattggcgcctggactgcaagtgtatcacgctcttccagaacaacacgaccaacagatactataaggaaattccgctgtcagaaatcctcacggtggagtccgcccagaacttcagccttgtgccgccgggcaccaacccacactgctttgagatcgtcactgccaatgccacctacttcgtgggcgagatgcctggcgggactccgggtgggccaagtgggcagggggctgaggccgcccggggctgggagacagccatccgccaggccctgatgcccgtcatccttcaggacgcacccagcgccccaggccacgcgccccacagacaagcttctctgagcatctctgtgtccaacagtcagatccaagagaatgtggacattgccactgtctaccagatcttccctgacgaagtgctgggctcagggcagtttggagtggtctatggaggaaaacaccggaagacaggccgggacgtggcagttaaggtcattgacaaactgcgcttccctaccaagcaggagagccagctccggaatgaagtggccattctgcagagcctgcggcatcccgggatcgtgaacctggagtgcatgttcgagacgcctgagaaagtgtttgtggtgatggagaagctgcatggggacatgttggagatgatcctgtccagtgagaagggccggctgcctgagcgcctcaccaagttcctcatcacccagatcctggtggctttgagacaccttcacttcaagaacattgtccactgtgacttgaaaccagaaaacgtgttgctggcatcagcagacccatttcctcaggtgaagctgtgtgactttggctttgctcgcatcatcggcgagaagtcgttccgccgctcagtggtgggcacgccggcctacctggcacccgaggtgctgctcaaccagggctacaaccgctcgctggacatgtggtcagtgggcgtgatcatgtacgtcagcctcagcggcaccttccctttcaacgaggatgaggacatcaatgaccagatccagaacgccgccttcatgtacccggccagcccctggagccacatctcagctggagccattgacctcatcaacaacctgctgcaggtgaagatgcgcaaacgctacagcgtggacaaatctctcagccacccctggttacaggagtaccagacgtggctggacctccgagagctggaggggaagatgggagagcgatacatcacgcatgagagtgacgacgcgcgctgggagcagtttgcagcagagcatccgctgcctgggtctgggctgcccacggacagggatctcggtggggcctgtccaccacaggaccacgacatgcaggggctggcggagcgcatcagtgttctctgaggtcctgtgccctcgtccagctgctgccctccacagcggttcttcacaggatcccagcaatgaactgttctagggaaagtggcttcctgcccaaactggatgggacacgtggggagtggggtggggggagctatttccaaggcccctccctgtttccccagcaattaaaacggactcatctctggccccatggccttgatctcagcaaaaaaaaaaaaaaaaa

SEQ ID NO: 45 - DNA, 5414 bp, Homo sapiens
gcttggggcctgggcagccacactgcacgcaggctgggccgactgaggggctcagaggccaggctctgaggcccacgcagggcctagggtgggaagatggcaggtgggggcggcgacctgagcaccaggaggctgaatgaatgtatttcaccagtagcaaatgagatgaaccatcttcctgcacacagccacgatttgcaaaggatgttcacggaagaccagggtgtagatgacaggctgctctatgacattgtattcaagcacttcaaaagaaataaggtggagatttcaaatgcaataaaaaagacatttccattcctcgagggcctccgtgatcgtgatctcatcacaaataaaatgtttgaagattctcaagattcttgtagaaacctggtccctgtacagagagtggtgtacaatgttcttagtgaactggagaagacatttaacctgccagttctggaagcactgttcagcgatgtcaacatgcaggaataccccgatttaattcacatttataaaggctttgaaaatgtaatccatgacaaattgcctctccaagaaagtgaagaagaagagagggaggagaggtctggcctccaactaagtcttgaacaaggaactggtgaaaactcttttcgaagcctgacttggccaccttcgggttccccatctcatgctggtacaaccccacctgaaaatggactctcagagcacccctgtgaaacagaacagataaatgcaaagagaaaagatacaaccagtgacaaagatgattcgctaggaagccaacaaacaaatgaacaatgtgctcaaaaggctgagccaacagagtcctgcgaacaaattgctgtccaagtgaataatggggatgctggaagggagatgccctgcccgttgccctgtgatgaagaaagcccagaggcagagctacacaaccatggaatccaaattaattcctgttctgtgcgactggtggatataaaaaaggaaaagccattttctaattcaaaagttgagtgccaagcccaagcaagaactcatcataaccaggcatctgacataatagtcatcagcagtgaggactctgaaggatccactgacgttgatgagcccttagaagtcttcatctcagcaccgagaagtgagcctgtgatcaataatgacaaccctttagaatcaaatgatgaaaaggagggccaagaagccacttgctcacgaccccagattgtaccagagcccatggatttcagaaaattatctacattcagagaaagttttaagaaaagagtgataggacaagaccacgacttttcagaatccagtgaggaggaggcgcccgcagaagcctcgagcggggcactgagaagcaagcatggtgagaaggctcctatgacttctagaagtacatctacttggagaatacccagcaggaagagacgtttcagcagtagtgacttttcagacctgagtaatggagaagagcttcaggaaacctgcagctcatccctaagaagagggtcaggatcacagccacaagaacctgaaaataagaagtgctcctgtgtcatgtgttttccaaaaggtgtgccaagaagccaagaagcaaggactgaaagtagtcaagcatctgacatgatggataccatggatgttgaaaacaattctactttggaaaaacacagtgggaaaagaagaaaaaagagaaggcatagatctaaagtaaatggtctccaaagagggagaaagaaagacagacctagaaaacatttaactctgaataacaaagtccaaaagaaaagatggcaacaaagaggaagaaaagccaacactagacctttgaaaagaagaagaaaaagaggtccaagaattcccaaagatgaaaatattaattttaaacaatctgaacttcctgtgacctgtggtgaggtgaagggcactctatataaggagcgattcaaacaaggaacctcaaagaagtgtatacagagtgaggataaaaagtggttcactcccagggaatttgaaattgaaggagaccgcggagcatccaagaactggaagctaagtatacgctgcggtggatataccctgaaagtcctgatggagaacaaatttctgccagaaccaccaagcacaagaaaaaagagaatactggaatctcacaacaataccttagttgacccttgtccggaaaactcaaatatatgtgaggtgtgcaacaaatggggacggctgttctgctgcgacacttgtccaagatcctttcatgagcactgccacatcccatccgtggaagctaacaagaacccgtggagttgcatcttctgcaggataaagactattcaggaaagatgcccagaaagccaatcaggtcatcaggaatctgaagtcctgatgaggcagatgctgcctgaggagcagttgaaatgtgaattcctcctcttgaaggtctactgtgattcgaaaagctgctttttcgcctcagaaccgtattataacagagaggggtctcagggcccacagaagcccatgtggttaaacaaagtcaagacaagtttgaatgagcagatgtacacccgagtagaagggtttgtgcaggacatgcgtctcatctttcataaccacaaggaattttacagggaagataaattcaccagactgggaattcaagtacaggacatctttgagaagaatttcagaaacatttttgcaattcaggaaacaagcaagaacattataatgtttatttagccattcttatctcctcccttcagatcctctggcagctagctacgcaatgtgcctgtggtcccactaatctgtgactgctcctgtggaaactccacatcacaattctccaaaatttatcattgccattttaaaaccgtcttttcagctttcaataaaattcaacaccccttcatgttaaaaattctcaataagctaggtattgaggaacatatcccaaaataataagagccatttatgacaaacccacagacaacattatatggaatgcgcaaaagaagcattccccttgaaaacaagcacaagacaaggattccctctctcaccactcctattcaacaaagtattggaagtcctggtcagagcagtcaggaagcagaaaaaaataaagggtatctaaataggcaaagaggaagtcaaactatccctgtttgcacacaacattgattctatatctagaaaaccccctagtctcagcccagaagctccttctgctgataaacaatttcagagatgtttcagaatacaaaattagtatatgaaaattactagtattcctatacaccagcaatagccaagccaagagccaaatcaggaaggcaatctcattcacaattgccactaaaagaataaaatacctaggaatacagctaatcagggaggtgagagagttctacaatgagaattacgaaacactgctcaaagagattggagatgacacaaacaaatggaaaaacatcccatgctcctgtgtagaaacagtcaatatcattaaaatgaccatactgcccaaagcagtttacaggttcaatgttattcctatcaaaccaccaatgacattcttcacagaactagataaaactattttaaaattcatacagaaccaaaaaagagcccaaatagccaaggcaatcctaagcaaaaagaacaaagctgaaggcatcacgttaccccacttcaaactatattacagggcttcagtaaccaaaacagcatggtactggtaccaaaaaaaaagccacatagaccaatggaacagaacgaagagcacagaataagaccacactcctatgaccatctgatcgtcgataaaaacaagcaatgggaaaaagactccctattttataaatggtgctgggataactgggatagaagattgaagctagacctcttccttacaccatatacaaaaatcaactcaagatcaattaaagacttaatgtaaaatcaaaaactatgaagactctggaagacaacctaggcaataccatcctggacataggaacaggcaaagatttcatgataaagacaaaagcaatagcaacaaaagcaaaatttgacaaatgggatctaattaaacttaagagattctgcacagcaaaagaaacaatcaacagagtaaacagacaacctacaaaatgggagaaaatatttgcacactatgcatctgacaaaggtctaatagccagcttctatagggaacttaaacaaatttacaagacaaaaagaaataaccccattaaaaagtgggcaaaggacatgaaagacactttttttttttaagatggagtttcactcttgttgcccaggccagagtgcaatggcgtgatcttggctcaccacaacctctgcctcccgggttcaagcaattctcctgcctcagcctcccaggtggctgggattacaggcatgcaccacctgactgattttgtattttagtagagacggggtttctccacattggtcaggctggtcttgaactcccgacctcaggtgatccacccacctcggcctcccaaagtgctgggattacaggcatcagccaccatgcccggatgaaaagacactttccaaaagaagatacacatgcggccaacaagcatgttttaaaagctcaatatcactgatcgttagagacatgcaaattaaaactacaatgagacaccatctcacaccagtcaaaatgcctctttctaaaaagtcaaaaaataacagctagtaaggttgtggagaaaagggaacatttatacactattgatgggagtgtaaattagttcaaccactgtggaaagcagtgtggcaactcctcatagtgctaaaagcagaactgccattccacccagcaatcccattactgggtacatacccagaggaatataaatcattctaccataaagacacatgcatgcaaatgtccactgcagcactattcacaatagcaaagatacagaatcaacctaagtgcccatcagtaacagattggataaagaaaatatggtacacatacaccatggaatagtatgcagccataagaaacaatgagatcatgtctcaggaacatggatagagctggaggctattatccttagcaaactaattcaggaacagaaaaccaaataccacaggttctcagttgtgagtgggagctaaatgatgagaactcatgaacacaatgaagggaacagacactagggtctacttgagggtggaggatgggaagagggagaggagcagaaaaagtacctattggtgatgaagtactctgtacaacaaacccgtgacaagagtttccctatataacaaaccttcacatatacccctgaacctaaaagtttttttaattgtaaataaatggatcattaaaaaaaattttaataataaaa

SEQ ID NO: 46 - DNA, 2094 bp, Homo sapiens
cacttgttcaatgatgtacccccagtgtcaggcgctttgcaaacacacgatacatacgggttgatgtttggtcaagagaggaattaagaccaggcagacagcaggctgggatcagagagaccccatttctgtctgaaatgtctgcagagaacctggtgcctgcctcagccctagctctggggaaatgaaagccaggctggggttcaaatgagggcagtttcccttcctgtgggctgctgatggaacaaccccatgacgagaaggacccagcctccaagcggccacaccctgtgtgtctctttgtcctgccggcactgaggactcatccatctgcacagctggggcccctgggaggagacgccatgatccccaccttcacggctctgctctgcctcgggctgagtctgggccccaggacccacatgcaggcagggcccctccccaaacccaccctctgggctgagccaggctctgtgatcagctgggggaactctgtgaccatctggtgtcaggggaccctggaggctcgggagtaccgtctggataaagaggaaagcccagcaccctgggacagacagaacccactggagcccaagaacaaggccagattctccatcccatccatgacagaggactatgcagggagataccgctgttactatcgcagccctgtaggctggtcacagcccagtgaccccctggagctggtgatgacaggagcctacagtaaacccaccctttcagccctgccgagtcctcttgtgacctcaggaaagagcgtgaccctgctgtgtcagtcacggagcccaatggacactttccttctgatcaaggagcgggcagcccatcccctactgcatctgagatcagagcacggagctcagcagcaccaggctgaattccccatgagtcctgtgacctcagtgcacggggggacctacaggtgcttcagctcacacggcttctcccactacctgctgtcacaccccagtgaccccctggagctcatagtctcaggatccttggaggatcccaggccctcacccacaaggtccgtctcaacagctgcaggccctgaggaccagcccctcatgcctacagggtcagtcccccacagtggtctgagaaggcactgggaggtactgatcggggtcttggtggtctccatcctgcttctctccctcctcctcttcctcctcctccaacactggcgtcagggaaaacacaggacattggcccagagacaggctgatttccaacgtcctccaggggctgccgagccagagcccaaggacgggggcctacagaggaggtccagcccagctgctgacgtccagggagaaaacttctgtgctgccgtgaagaacacacagcctgaggacggggtggaaatggacactcggagcccacacgatgaagacccccaggcagtgacgtatgccaaggtgaaacactccagacctaggagagaaatggcctctcctccctccccactgtctggggaattcctggacacaaaggacagacaggcagaagaggacagacagatggacactgaggctgctgcatctgaagccccccaggatgtgacctacgcccagctgcacagctttaccctcagacagaaggcaactgagcctcctccatcccaggaaggggcctctccagctgagcccagtgtctatgccactctggccatccactaatccaggggggacccagaccccacaagccatggagactcaggaccccagaaggcatggaagctgcctccagtagacatcactgaaccccagccagcccagacccctgacacagaccactagaagattccgggaacgttgggagtcacctgattctgcaaagataaataatatccctgcattatcaaaataaagtagcagacctctcaattcacaatgagttaactgataaaacaaaacagaagtcagacaatgttttaaattgaatgatcatgtaaatattacacatcaaaccaatgacatgggaaaatgggagcttctaatgaggacaaacaaaaaatagagaaaaattaataaagtcaaaatgtttattcttgaaaaaaaaaaaaaa

SEQ ID NO: 47 - DNA, 2045 bp, Homo sapiens
agcatttccttccctgacagccggacctgggactgggctggggccctggcggatggagacatgctgcccctgctgctgctgcccctgctgtggggggggtccctgcaggagaagccagtgtacgagctgcaagtgcagaagtcggtgacggtgcaggagggcctgtgcgtccttgtgccctgctccttctcttacccctggagatcctggtattcctctcccccactctacgtctactggttccgggacggggagatcccatactacgctgaggttgtggccacaaacaacccagacagaagagtgaagccagagacccagggccgattccgcctccttggggatgtccagaagaagaactgctccctgagcatcggagatgccagaatggaggacacgggaagctatttcttccgcgtggagagaggaagggatgtaaaatatagctaccaacagaataagctgaacttggaggtgacagccctgatagagaaacccgacatccactttctggagcctctggagtccggccgccccacaaggctgagctgcagccttccaggatcctgtgaagcgggaccacctctcacattctcctggacggggaatgccctcagccccctggaccccgagaccacccgctcctcggagctcaccctcacccccaggcccgaggaccatggcaccaacctcacctgtcaggtgaaacgccaaggagctcaggtgaccacggagagaactgtccagctcaatgtctcctatgctccacagaacctcgccatcagcatcttcttcagaaatggcacaggcacagccctgcggatcctgagcaatggcatgtcggtgcccatccaggagggccagtccctgttcctcgcctgcacagttgacagcaacccccctgcctcactgagctggttccgggagggaaaagccctcaatccttcccagacctcaatgtctgggaccctggagctgcctaacataggagctagagagggaggggaattcacctgccgggttcagcatccgctgggctcccagcacctgtccttcatcctttctgtgcagagaagctcctcttcctgcatatgtgtaactgagaaacagcagggctcctggcccctcgtcctcaccctgatcaggggggctctcatgggggctggcttcctcctcacctatggcctcacctggatctactataccaggtgtggaggcccccagcagagcagggctgagaggcctggctgagcccctcccgctcaagacagaactgaggtgtggacacttagccctgtgggacacatgcaggacatcactgtcagcttctttctggaagctcacatcccactgactacccctcttttccttcctgccccataccccttctacttattcccctctgcttgtgagtcttgccccaccacacctgcatccccatctgcaccccatcccctctccacctgcccttctcttccctctccatccaccatctccagccctgtgaagggaatgtactttcggtcttatacccccattacccattacccaaaagttaccttttttttttttttttttttttgagacagagtctcactctgttgcacaggctggagttcagtggcacaatctccgttcactgcaacctccacctctggggttcaagcaattctcctgcctcagcctccctagtagctgggattacaggtgcctgccaccacatccagttaattttttttttttgtatgttagtagagatggggttttaccatgttggccaggtctcgaactcctgacctcaagcaatccactgcattggcctcccaaagtgctggcattacaggtatgagccaccgtgcctggctgccaaaagttaccttcttaacacttgaatttctggtctcctcagcttccctatccatataggcacagagaggcagcatttgttttccagttaaaactctacctcattgtgattattatccaatacaattgttacaaaataagtaaaacttttatgaaacaatacaacataactgatttta

SEQ ID NO: 48 - DNA, 1598 bp, Homo sapiens
agtggaccgctgtgcgcgaaccctgaaccctacggtcccgacccgcgggcgaggccgggtacctgggctgggatccggagcaagcgggcgagggcagcgccctaagcaggcatccccgcaggcccggagcgatggcagccttgatgaccccgggaaccggggccccacccgcgcctggtgacttctccggggaagggagccagggacttcccgacccttcgccagagcccaagcagctcccggagctgatccgcatgaagcgagacggaggccgcctgagcgaagcggacatcaggggcttcgtggccgctgtggtgaatgggagcgcgcagggcgcacagatcggggccatgctgatggccatccgacttcggggcatggatctggaggagacctcggtgctgacccaggccctggctcagtcgggacagcagctggagtggccagaggcctggcgccagcagcttgtggacaagcattccacagggggtgtgggtgacaaggtcagcctggtcctcgcacctgccctggcggcatgtggctgcaaggtgccaatgatcagcggacgtggtctggggcacacaggaggcaccttggataagctggagtctattcctggattcaatgtcatccagagcccagagcagatgcaagtgctgctggaccaggcgggctgctgtatcgtgggtcagagtgagcagctggttcctgcggacggaatcctatatgcagccagagatgtgacagccaccgtggacagcctgccactcatcacagcctccattctcagtaagaaactcgtggaggggctgtccgctctggtggtggacgttaagttcggaggggccgccgtcttccccaaccaggagcaggcccgggagctggcaaagacgctggttggcgtgggagccagcctagggcttcgggtcgcggcagcgctgaccgccatggacaagcccctgggtcgctgcgtgggccacgccctggaggtggaggaggcgctgctctgcatggacggcgcaggcccgccagacttaagggacctggtcaccacgctcgggggcgccctgctctggctcagcggacacgcggggactcaggcccagggcgctgcccgggtggccgcggcgctggacgacggctcggcccttggccgcttcgagcggatgctggcggcgcagggcgtggatcccggtctggcccgagccctgtgctcgggaagtcccgcagaacgccggcagctgctgcctcgcgcccgggagcaggaggagctgctggcgcccgcagatggcaccgtggagctggtccgggcgctgccgctggcgctggtgctgcacgagctcggggccgggcgcagccgcgctggggagccgctccgcctgggggtgggcgcagagctgctggtcgacgtgggtcagaggctgcgccgtgggaccccctggctccgcgtgcaccgggacggccccgcgctcagcggcccgcagagccgcgccctgcaggaggcgctcgtactctccgaccgcgcgccattcgccgccccctcgcccttcgcagagctcgttctgccgccgcagcaataaagctcctttgccgcgaaa

SEQ ID NO: 49 - DNA, 1354 bp, Homo sapiens
aatatcttgcatgttacagatttcactgctcccaccagcttggagacaacatgtggttcttgacaactctgctcctttgggttccagttgatgggcaagtggacaccacaaaggcagtgatcactttgcagcctccatgggtcagcgtgttccaagaggaaaccgtaaccttgcactgtgaggtgctccatctgcctgggagcagctccacacagtggtttctcaatggcacagccactcagacctcgacccccagctacagaatcacctctgccagtgtcaatgacagtggtgaatacaggtgccagagaggtctctcagggcgaagtgaccccatacagctggaaatccacagaggctggccactactgcaggtctccagcagagtcttcacggaaggagaacctctggccttgaggtgtcatgcgtggaaggataagctggtgtacaatgtgctttactatcgaaatggcaaagcctttaagtttttccactggaattctaacctcaccattctgaaaaccaacataagtcacaatggcacctaccattgctcaggcaagggaaagcatcactacacatcagcaggaatatcacaatacactgtgaaagagctatttccagctccagtgctgaatgcatctgtgacatccccactcctggggggaatctggtcaccctgagctgtgaaacaaagttgctcttgcagaggcctggtttgcagctttacttctccttctacatgggcagcaagaccctgcgaggcaggaacacatcctctgaatactaaatactaactgctagaagagaagactctgggttatactggtgcgaggctgccacagaggatggaaatgtccttaagcgcagccctgagttggagcttcaagtgcttggcctccagttaccaactcctgtctggtttcatgtccttttctatctggcagtgggaataatgtttttagtgaacactgttctctgggtgacaatacgtaaagaactgaaaagaaagaaaaagtggaatttagaaatctctttggattctggtcatgagaagaaggtaatttccagccttcaagaagacagacatttagaagaagagctgaaatgtcaggaacaaaaagaagaacagctgcaggaaggggtgcaccggaaggagccccagggggccacgtagcagcggctcagtgggtggccatcgatctggaccgtcccctgtccacttgctccccgtgagcactgcgtacaaacatccaaaagttcaacaacaccagtctaaccagaactgtgtgtctcatggtatataactcttaaagcaaataaatgaactgacttcaaaaaaaaaaaaaaaaaa

SEQ ID NO: 50 - DNA, 1242 bp, Homo sapiens
agacggcgacagcagcggcggcgagcgcctcggagcgcggcggaacagcgccccccgagccccgtgccccccgacgggtccgcccgcccgcccgccctcccgaggagcgccggcccgggcccgcgagggccgccgccaccccgcagcagatttggatcccccgcccggcgagcccccggctgctgcctcccggggggccccggcgcagcggccgccctcggagagccccggcgccccgccgcccggccccgcagacgccggaggcgccatggccgccaagcccggcgagctgatgggcatctgctccagttaccaggcggtgatgccgcacttcgtgtgcctggccgacgagttcccgcagcccgtgcggcccgccaagctgcccaagggccggggccggctgcggcggccgcgccagtctcgcttcaagacgcagccggtgaccttcgacgagatccaggaggtggaggaggagggggtgtcccccatggaggaggagaaggccaagaagtcgttcctgcagagcctggagtgcctgcgccgcagcacgcagagcctgtcgctgcagcgggagcagctcagcagctgcaaactgaggaacagcctggactccagcgactccgactcggccctgtaaggggcgccgcccgcgggggggacgcgcgcgtccgcggtccgcgcggggaccggcgtgtgaaccccgagagtgcccgcgccctgctcccgggggacccgcaaggacccgggaccgccgctcctcgcgcgctcggactcccgccccgctgcgaaccggtcggtgcgcccctcgccgcgctcgccctggcccgggagcgccgggagcggggccgctttcctcgtccttgtaaatgtttattttttaactcttcccagtgcgaactctgctgtgagtgtgtgcggggaggcgcgcccgcgctgagtcggcggcgggtagccactccatgcccttgtccgatggtttgcaactccgattttgcacaccgctccaccgtgccccccagcgcacacccattcacactcacgccaacactctcgctgaacacttttataattgttaggcgtggccgttgggactttgggcgcagcgcggctgctactgcgtctggaggattgatatttatttttgcattgcgatggctgaaggcatttatttaacgatctttttacctggatatgtctgtgaggctcctgaaaggagacaaataaagtcaatatatttgcaca

SEQ ID NO: 51 - DNA, 6877 bp, Homo sapiens
ggcacggaaaaggccaggcgacaggtgtcgcttgaaaagactgggcttgtccttgctggtgcatgcgtcgtcggcctctgggcagcaggtttacaaaggaggaaaacgacttcttctagatttttttttcagtttcttctataaatcaaaacatctcaaaatggagacctaaaatccttaaagggacttagtctaatctcgggaggtagttttgtgcatgggtaaacaaattaagtattaactggtgttttactatccaaagaatgctaattttataaacatgatcgagttatataaggtataccataatgagtttgattttgaatttgatttgtggaaataaaggaaaagtgattctagctggggcatattgttaaagcatttttttcagagttggccaggcagtctcctactggcacattctcccattatgtagaatagaaatagtacctgtgtttgggaaagattttaaaatgagtgacagttatttggaacaaagagctaataatcaatccactgcaaattaaagaaacatgcagatgaaagttttgacacattaaaatacttctacagtgacaaagaaaaatcaagaacaaagctttttgatatgtgcaacaaatttagaggaagtaaaaagataaatgtgatgattggtcaagaaattatccagttatttacaaggccactgatattttaaacgtccaaaagtttgtttaaatgggctgttaccgctgagaatgatgaggatgagaatgatggttgaaggttacattttaggaaatgaagaaacttagaaaattaatataaagacagtgatgaatacaaagaagatttttataacaatgtgtaaaatttttggccagggaaaggaatattgaagttagatacaattacttacctttgagggaaataattgttggtaatgagatgtgatgtttctcctgccacctggaaacaaagcattgaagtctgcagttgaaaagcccaacgtctgtgagatccaggaaaccatgcttgcaaaccactggtaaaaaaaaaaaaaaaaaaaaaaaaaagccacagtgacttgcttattggtcattgctagtattatcgactcagaacctctttactaatggctagtaaatcataattgagaaattctgaattttgacaaggtctctgctgttgaaatggtaaatttattattttttttgtcatgataaattctggttcaaggtatgctatccatgaaataatttctgaccaaaactaaattgatgcaatttgattatccatcttagcctacagatggcatctggtaacttttgactgttttaaaaaataaatccactatcagagtagatttgatgttggcttcagaaacatttagaaaaacaaaagttcaaaaatgttttcaggaggtgataagttgaataactctacaatgttagttctttgagggggacaaaaaatttaaaatctttgaaaggtcttattttacagccatatctaaattatcttaagaaaatttttaacaaagggaatgaaatatatatcatgattctgtttttccaaaagtaacctgaatatagcaatgaagttcagttttgttattggtagtttgggcagagtctctttttgcagcacctgttgtctaccataattacagaggacatttccatgttctagccaagtatactattagaataaaaaaacttaacattgagttgcttcaacagcatgaaactgagtccaaaagaccaaatgaacaaacacattaatctctgattatttattttaaatagaatatttaattgtgtaagatctaatagtatcattatacttaagcaatcatattcctgatgatctatgggaaataactattatttaattaatattgaaaccaggttttaagatgtgttagccagtcctgttactagtaaatctctttatttggagagaaattttagattgttttgttctccttattagaaggattgtagaaagaaaaaaatgactaattggagaaaaattggggatatatcatatttcactgaattcaaaatgtcttcagttgtaaatcttaccattattttacgtacctctaagaaataaaagtgcttctaattaaaatatgatgtcattaattatgaaatacttcttgataacagaagttttaaaatagccatcttagaatcagtgaaatatggtaatgtattattttcctcctttgagttaggtcttgtgcttttttttcctggccactaaatttcacaatttccaaaaagcaaaataaacatattctgaatatttttgctgtgaaacacttgacagcagagctttccaccatgaaaagaagcttcatgagtcacacattacatctttgggttgattgaatgccactgaaacattctagtagcctggagaagttgacctacctgtggagatgcctgccattaaatggcatcctgatggcttaatacacatcactcttctgtgaagggttttaattttcaacacagcttactctgtagcatcatgtttacattgtatgtataaagattatacaaaggtgcaattgtgtatttcttccttaaaatgtatcagtataggatttagaatctccatgttgaaactctaaatgcatagaaataaaaataataaaaaatttttcattttggcttttcagcctagtattaaaactgataaaagcaaagccatgcacaaaactacctccctagagaaaggctagtcccttttcttccccattcatttcattatgaacatagtagaaaacagcatattcttatcaaatttgatgaaaagcgccaacacgtttgaactgaaatacgacttgtcatgtgaactgtaccgaatgtctacgtattccacttttcctgctggggttcctgtctcagaaaggagtcttgctcgtgctggtttctattacactggtgtgaatgacaaggtcaaatgcttctgttgtggcctgatgctggataactggaaaagaggagacagtcctactgaaaagcataaaaagttgtatcctagctgcagattcgttcagagtctaaattccgttaacaacttggaagctacctctcagcctacttttccttcttcagtaacaaattccacacactcattacttccgggtacagaaaacagtggatatttccgtggctcttattcaaactctccatcaaatcctgtaaactccagagcaaatcaagatttttctgccttgatgagaagttcctaccactgtgcaatgaataacgaaaatgccagattacttacttttcagacatggccattgacttttctgtcgccaacagatctggcaaaagcaggcttttactacataggacctggagacagagtggcttgctttgcctgtggtggaaaattgagcaattgggaaccgaaggataatgctatgtcagaacacctgagacattttcccaaatgcccatttatagaaaatcagcttcaagacacttcaagatacacagtttctaatctgagcatgcagacacatgcagcccgctttaaaacattctttaactggccctctagtgttctagttaatcctgagcagcttgcaagtgcgggtttttattatgtgggtaacagtgatgatgtcaaatgcttttgctgtgatggtggactcaggtgttgggaatctggagatgatccatgggttcaacatgccaagtggtttccaaggtgtgagtacttgataagaattaaaggacaggagttcatccgtcaagttcaagccagttaccctcatctacttgaacagctgctatccacatcagacagcccaggagatgaaaatgcagagtcatcaattatccattttgaacctggagaagaccattcagaagatgcaatcatgatgaatactcctgtgattaatgctgccgtggaaatgggctttagtagaagcctggtaaaacagacagttcagagaaaaatcctagcaactggagagaattatagactagtcaatgatcttgtgttagacttactcaatgcagaagatgaaataagggaagaggagagagaaagagcaactgaggaaaaagaatcaaatgatttattattaatccggaagaatagaatggcactttttcaacatttgacttgtgtaattccaatcctggatagtctactaactgccggaattattaatgaacaagaacatgatgttattaaacagaagacacagacgtctttacaagcaagagaactgattgatacgattttagtaaaaggaaatattgcagccactgtattcagaaactctctgcaagaagctgaagctgtgttatatgagcatttatttgtgcaacaggacataaaatatattcccacagaagatgtttcagatctaccagtggaagaacaattgcggagactacaagaagaaagaacatgtaaagtgtgtatggacaaagaagtgtccatagtgtttattccttgtggtcatctagtagtatgcaaagattgtgctccttctttaagaaagtgtcctatttgtaggagtacaatcaagggtacagttcgtacatttctttcatgaagaagaaccaaaacatcgtctaaactttagaattaatttattaaatgtattataactttaacttttatcctaatttggtttccttaaaatttttatttatttacaactcaaaaaacattgttttgtgtaacatatttatatatgtatctaaaccatatgaacatatattttttagaaactaagagaatgataggcttttgttcttatgaacgaaaaagaggtagcactacaaacacaatattcaatcaaaatttcagcattattgaaattgtaagtgaagtaaaacttaagatatttgagttaacctttaagaattttaaatattttggcattgtactaataccgggaacatgaagccaggtgtggtggtatgtgcctgtagtcccaggctgaggcaagagaattacttgagcccaggagtttgaatccatcctgggcagcatactgagaccctgcctttaaaaacaaacagaacaaaaacaaaacaccagggacacatttctctgtcttttttgatcagtgtcctatacatcgaaggtgtgcatatatgttgaatgacattttagggacatggtgtttttataaagaattctgtgagaaaaaatttaataaagcaacaaaaattactcttattcttcattgctttatttcaatgacattggatagtttagtcactcccagactctttccataccttcttaaagcctctcaaatattgaactacagtttatactccttcccataagatgcttcttcattgacacttgtagaacacggggtcaacacatcataaaatctattatggaatgcctgagacaagaatcaaacagtccctttagtaagtttgtttattcacttctctattgattcattcaagaagtctcatgccagccccacctattggaagaaggtctgagttttattcttatctctttggtattaattctgaaacttagaaagtacactggttagcaatgcttgggaccaacaggttgttctggtaaataaatctgtttcatattgtcagtgcaacaaaatgtccccctctgcattatgttattggtactcaacacgtccgagtcataactctgtcctttgcttcttatagaggtattaggtcttcaagagcagaagtaagactgtaatagggaatactcaggggaaggcaggcaaaggctagtcatctaaaccagttctagatgtctgtataggggcagatggctctgtaagggcagaagggaaagaccccttcataagggtcacagctgacaatcctataacaaaagacaggttaacaagagaaaaacttaacaaatttatttaatcacagatttacatcaccggggagccttcgtaatgaagatccaaaattacaggggaaactgtgcatttttatgcttaggtttgataatgaatggacagccctgaagaatagtgattggaaaaaaaggatatgatctaatgggaatagacacaggttggggacccagcaaggcctgtctgttcagattattcttggtctctgtgcagcattccttcctcctggatatagggcagggcctgtatgggatggggatattataacctgctatcaagcaaggtaggtcagagaatttatttatggccagctcttacatagttaggtgaggaaagattagagtactatctttaagatgtaagtctggcattgtggaaagatggttccagtttctatgacctaccttggggaagaggaattcaagtttctgtggcttgccttcagggagaatgaggctgagacaggagggcaggataacatcagagaaaaactttgcttctgaggccttcactttgggttttctgagccccaacatctgctagtgttgtaaagagaacaattagggaccaagtgaggggaggaaagaatccatctctgcattctgatgctgggagacttatttccttgaaatgcaattgattttgcctctgctaagaggctctgctggctacccatgtactagccagtgtcctgcatgggtgctaggctgaattatttgtaattgtgcttaggtgatttgtaactcaggtatagggtatttaaatagtaggcaccctttttgcaccatgtgtttttttttttatctagttcttgtatactacagataatatttgaactttgtcatctcactgtaaaacttttgttcatttctcattatggtaataaatagctattataaccaacccatttattcaaatatgttatttccctaagtgttattttgacattttgttttggaaaaaataaatcaccatagataataa

SEQ ID NO: 52 - DNA, 2170 bp, Homo sapiens
acagagcaacttcctctagagggagctgattggagccgggtgccgctggcacctctatgatcactggagtctcgcgggtccctcgggctgcacagggacaagtaaaggctacatccagatgccgggaatgcactgacgcccattcctggaaactgggctcccactcagcccctgggagcagcagccgccagcccctcgggacctccatctccaccctgctgagccacccgggttgggccaggatcccggcaggctgatcccgtcctccactgagacctgaaaaatggcttcggggcaaggcccaggtcctcccaggcaggagtgcggagagcctgccctgccctctgcttctgaggagcaggtagcccaggacacagaggaggttttccgcagctacgttttttaccgccatcagcaggaacaggaggctgaaggggtggctgcccctgccgacccagagatggtcaccttacctctgcaacctagcagcaccatggggcaggtgggacggcagctcgccatcatcggggacgacatcaaccgacgctatgactcagagttccagaccatgttgcagcacctgcagcccacggcagagaatgcctatgagtacttcaccaagattgccaccagcctgtttgagagtggcatcaattggggccgtgtggtggctcttctgggcttcggctaccgtctggccctacacgtctaccagcatggcctgactggcttcctaggccaggtgacccgcttcgtggtcgacttcatgctgcatcactgcattgcccggtggattgcacagaggggtggctgggtggcagccctgaacttgggcaatggtcccatcctgaacgtgctggtggttctgggtgtggttctgttgggccagtttgtggtacgaagattcttcaaatcatgactcccaagggtgccctttggggtcccggttcagacccctgcctggacttaagcgaagtctttgccttctctgttcccttgcaggggtcccccctcaagagtacagaagctttagcaagtgtgcactccagcttcggagggcccctgcgtgggggccagtcaggctgcagaggcacctcaacattgcatggtgctagtgggccctctctctgggcccaggggctgtggccgtctcctccctcagctctctgggacctccttagccctgtctgctaggcgctggggagactgataacttggggaggcaagagactgggagccacttctccccagaaagtgtttaacggttttagctttttataatacccttgtgagagcccattcccaccattctacctgaggccaggacgtctggggtgtggggattggtgggtctatgttccccaggattcagctattctggaagatcagcaccctaagagatgggactaggacctgagcctggtcctggccgtccctaagcatgtgtcccaggagcaggacctactaggagaggggggccaaggtcctgctcaactctacccctgctcccattcctccctccggccatactgcctttgcagttggactctcagggattctgggcttggggtgtggggtggggtggagtcgcagaccagagctgtctgaactcacgtgtcagaagcctccaagcctgcctcccaaggtcctctcagttctctcccttcctctctccttatagacacttgctcccaacccattcactacaggtgaaggctctcacccccatccctgggggccttgggtgagtggcctgctaaggctcctccttgcccagactacagggcttaggacttggtttgttatatcagggaaaaggagtagggagttcatctggagggttctaagtgggagaaggactatcaacaccactaggaatcccagaggtgggatcctccctcatggctctggcacagtgtaatccaggggtgtagatgggggaactgtgaatacttgaactctgttcccccaccctccatgctcctcacctgtctaggtctcctcagggtggggggtgacagtgccttctctattgggcacagcctagggtcttgggggtcaggggggagaagttcttgattcagccaaatgcagggaggggaggcagatggagcccataggccaccccctatcctctgagtgtttggaaataaactgtgcaatcccctca

SEQ ID NO: 53 - DNA, 1555 bp, Homo sapiens
cccaaacccaactaattctactaccaaataacctcaactaaaacatttacccaaataaagtataggcgatagaaatgatatctcggcacaatagacataataccgcgatggaaagatgaaaaaacataaccaagcataaagtagcaaggacaaacccctataccttctgcataatgaattaactagaaataactttacaaagagaaccaaagccaagacccccgaaaccagacgagctacctaagaacagctgaaagagcacacccatctatgtagcaaaatagtgggaagattcataggtagaggtgacaagcctaccgagcctggtgatagctggttgtccaagatagaatcttagttcaactttaaatttatctacagaaccagctaatgcctttgtaaatttaactgttagtctaaagagggacagctctttagacactaggaaaaaaccttgtagagagagtaaaaaatataacttccaaagttggcctagaagaagcgatcaattaagaaggcgttcaagctcaacacccaaccacccaaaaaattccaaacacataactgaactcctcacatcacattggaccaatctatcatttcatagaagaaataatgttagtataagtgacatgcaaacattctcctccgcataagcctacatcagaccaaaatacttcactgacaattaacagcccaatatctataaataatcaatgaaaccattattacccacactgttaacccaacacaggcatgcttacaaggaaaggttaaaaaaagtaaaaggaactcagcgaatcttacccctcctgtttatcaaaaacatcacctctagcattaccagtactagaggcaccacctgcccagtgacatatgtttaatggctgcggtaccctaaccgtgtaaaggtagcataatcacttgttccttaaatagggacttgtctgaatggctccacgagggttcagctgtctcttactttcaaccagtgaaattgacctgcccgtgaagaggcggacataatacaacaagacgagaagaccctaaggagctttaatttatgaatgcaaacaagaccaaataggcccgcaggccctaaactaccagacctgcgttaaacatttcggttggggcgacctcggagtataacctaacctccgagcaacatatgctgagactataccagtcaaggcgaatatccacatacaattgacccaataatttgaccaacggaacaagttaccctagtgataacagtacaatcctattctagggtccacatcgacagtagcattaacgacctcgatgttggatcaggacatcccaatggtgcagccgctattaaaggttcgtttgttcaacgattagagtcctatgtgatctgagttcagaccggagtaatccaggttggtttctatctattctacatttcttccagtacgaaaggataagagaaatggggcccacttcataaagtgcccctgccccatagatgatattatctcagcattttactgtacccacacccacccaagaacagggtttgttaaga

SEQ ID NO: 54 - DNA, 2748 bp, Homo sapiens
ggcgggctgctcgctgcatctctgggcgtctttggctcgccacgctgggcagtgcctgcctgcgcctttcgcaacctcctcggccctgcgtggtctcgagctgggtgagcgagcgggcgggctggtaggctggcctgggctgcgaccggcggctacgactattctttggccgggtcggtgcgagtggtcggctgggcagagtgcacgctgcttggcgccgcaggctgatcccgccgtccactcccgggagcagtgatgttgggcaactctgcgccggggcctgcgacccgcgaggcgggctcggcgctgctagcattgcagcagacggcgctccaagaggaccaggagaatatcaacccggaaaaggcagcgcccgtccaacaaccgcggacccgggccgcgctggcggtactgaagtccgggaacccgcggggtctagcgcagcagcagaggccgaagacgagacgggttgcaccccttaaggatcttcctgtaaatgatgagcatgtcaccgttcctccttggaaagcaaacagtaaacagcctgcgttcaccattcatgtggatgaagcagaaaaagaagctcagaagaagccagctgaatctcaaaaaatagagcgtgaagatgccctggcttttaattcagccattagtttacctggacccagaaaaccattggtccctcttgattatccaatggatggtagttttgagtcaccacatactatggacatgtcaattatattagaagatgaaaagccagtgagtgttaatgaagtaccagactaccatgaggatattcacacataccttagggaaatggaggttaaatgtaaacctaaagtgggttacatgaagaaacagccagacatcactaacagtatgagagctatcctcgtggactggttagttgaagtaggagaagaatataaactacagaatgagaccctgcatttggctgtgaactacattgataggttcctgtcttccatgtcagtgctgagaggaaaacttcagcttgtgggcactgctgctatgctgttagcctcaaagtttgaagaaatataccccccagaagtagcagagtttgtgtacattacagatgatacctacaccaagaaacaagttctgagaatggagcatctagttttgaaagtccttacttttgacttagctgctccaacagtaaatcagtttcttacccaatactttctgcatcagcagcctgcaaactgcaaagttgaaagtttagcaatgtttttgggagaattaagtttgatagatgctgacccatacctcaagtatttgccatcagttattgctggagctgcctttcatttagcactctacacagtcacgggacaaagctggcctgaatcattaatacgaaagactggatataccctggaaagtcttaagccttgtctcatggaccttcaccagacctacctcaaagcaccacagcatgcacaacagtcaataagagaaaagtacaaaaattcaaagtatcatggtgtttctctcctcaacccaccagagacactaaatctgtaacaatgaaagactgcctttgttttctaagatgtaaatcactcaaagtatatggtgtacagtttttaacttaggttttaattttacaatcatttctgaatacagaagttgtggccaagtacaaattatggtatctattactttttaaatggttttaatttgtatatcttttgtatatgtatctgtcttagatatttggctaattttaagtggttttgttaaagtattaatgatgccagctgtcaggataataaattgatttggaaaactttgcaagtcaaatttaacttcttcaggattttgcttagtaaagaagtttacttggtttactatataatgggaagtgaaaagccttcctctaaaattaaagtaggtttaggaaaacagaccctcaaattctgacattcattttcctaagcaactggatcaatttgctgacttgggcataatctaatctaagcatatctgaatacagtattcagagatagatacagtagagattccccagactttttcgctctttgtaaaacctgtttgtttaggttttgcgaggtaaactcaacagaggttgggagtggaagagggtgggaagcttatatgcaaattaacagacgagaaatgctccagaaggtttattattttaaagcacattaaaaacaaaaaactatttttaaaatcctgctagattttataatggatttgtgaataaaaaatacccagggttctcagaatggaataaatatcccttttaatagttatatatacagatatacaactgttagctttaattggcagctctcttcttttttcttcttttcactggctttttacttggtgctttttcttgttttgcactggtggtctgtgttctgtgaataaagcaaagtaagaatttactaagagtatgttaagttttggattattgaaataagaggcatttcttagttttccagtaggatctaaaatgtgtcagctatgagtaagactggcatccaagaagtttatattatagatttaggtcctaatttttataaatcacaaggtaaaaaaatcacagaacagatggatctctaatgaaaaagggatgtctttttgtttatagtcatgtggcaagatgagagtaaaaccagagagcaaacctctataagtgttgagtatatgtatacatttgaaataaaccagaaatttgttacctta

SEQ ID NO: 55 - DNA, 1705 bp, Homo sapiens
gcagacagcctagctggactttgggtgaggcggttcagccatgaggctggctgtgcttttctcgggggccctgctggggctactggcagcccaggggacagggaatgactgtcctcacaaaaaatcagctactttgctgccatccttcacggtgacacccacggttacagagagcactggaacaaccagccacaggactaccaagagccacaaaaccaccactcacaggacaaccaccacaggcaccaccagccacggacccacgactgccactcacaaccccaccaccaccagccatggaaacgtcacagttcatccaacaagcaatagcactgccaccagccagggaccctcaactgccactcacagtcctgccaccactagtcatggaaatgccacggttcatccaacaagcaacagcactgccaccagcccaggattcaccagttctgcccacccagaaccacctccaccctctccgagtcctagcccaacctccaaggagaccattggagactacacgtggaccaatggttcccagccctgtgtccacctccaagcccagattcagattcgagtcatgtacacaacccagggtggaggagaggcctggggcatctctgtactgaaccccaacaaaaccaaggtccagggaagctgtgagggtgcccatccccacctgcttctctcattcccctatggacacctcagctttggattcatgcaggacctccagcagaaggttgtctacctgagctacatggcggtggagtacaatgtgtccttcccccacgcagcacagtggacattctcggctcagaatgcatcccttcgagatctccaagcacccctggggcagagcttcagttgcagcaactcgagcatcattctttcaccagctgtccacctcgacctgctctccctgaggctccaggctgctcagctgccccacacaggggtctttgggcaaagtttctcctgccccagtgaccggtccatcttgctgcctctcatcatcggcctgatccttcttggcctcctcgccctggtgcttattgctttctgcatcatccggagacgcccatccgcctaccaggccctctgagcatttgcttcaaaccccagggcactgagggggttggggtgtggtgggggggtacccttatttcctcgacacgcaactggctcaaagacaatgttattttccttccctttcttgaagaacaaaaagaaagccgggcatgacggctcatgcctgtaatcccagcactttgggaggctgaggcaggtggatcactggaggtcaggagtttgagaccagcctggccaacatggtgaaaccctgtctctactaaaaatacaattagccaggtgtggcggcgtaatcccagctggcctgtaatcccagctacttgggaggctgaggcagaactgcttgaacccaggaggtggaggttgcagtgagccgtcatcgcgccactaagccaagatcgcgccactgcactccagcctgggcgacagagccagactgtctcaaataaataaatatgagataatgcagtcgggagaagggagggagagaattttattaaatgtgacgaactgccccccccccccccccagcaggagagcagcaaaatttatgcaaatctttgacggggttttccttgtcctgccaggattaaaagccatgagtttcttgtca

SEQ ID NO: 56 - DNA, 1649 bp, Homo sapiens
cggtcggaactgctccggagggcacgggctccgtaggcaccaactgcaaggacccctccccctgcgggcgctcccatggcacagttcgcgttcgagagtgacctgcactcgctgcttcagctggatgcacccatccccaatgcaccccctgcgcgctggcagcgcaaagccaaggaagccgcaggcccggccccctcacccatgcgggccgccaaccgatcccacagcgccggcaggactccgggccgaactcctggcaaatccagttccaaggttcagaccactcctagcaaacctggcggtgaccgctatatcccccatcgcagtgctgcccagatggaggtggccagcttcctcctgagcaaggagaaccagcctgaaaacagccagacgcccaccaagaaggaacatcagaaagcctgggctttgaacctgaacggttttgatgtagaggaagccaagatccttcggctcagtggaaaaccacaaaatgcgccagagggttatcagaacagactgaaagtactctacagccaaaaggccactcctggctccagccggaagacctgccgttacattccttccctgccagaccgtatcctggatgcgcctgaaatccgaaatgactattacctgaaccttgtggattggagttctgggaatgtactggccgtggcactggacaacagtgtgtacctgtggagtgcaagctctggtgacatcctgcagcttttgcaaatggagcagcctggggaatatatatcctctgtggcctggatcaaagagggcaactacttggctgtgggcaccagcagtgctgaggtgcagctatgggatgtgcagcagcagaaacggcttcgaaatatgaccagtcactctgcccgagtgggctccctaagctggaacagctatatcctgtccagtggttcacgttctggccacatccaccaccatgatgttcgggtagcagaacaccatgtggccacactgagtggccacagccaggaagtgtgtgggctgcgctgggccccagatggacgacatttggccagtggtggtaatgataacttggtcaatgtgtggcctagtgctcctggagagggtggctgggttcctctgcagacattcacccagcatcaaggggctgtcaaggccgtagcatggtgtccctggcagtccaatgtcctggcaacaggagggggcaccagtgatcgacacattcgcatctggaatgtgtgctctggggcctgtctgagtgccgtggatgcccattcccaggtgtgctccatcctctggtctccccattacaaggagctcatctcaggccatggctttgcacagaaccagctagttatttggaagtacccaaccatggccaaggtggctgaactcaaaggtcacacatcccgggtcctgagtctgaccatgagcccagatggggccacagtggcatccgcagcagcagatgagaccctgaggctatggcgctgttttgagttggaccctgcgcggcggcgggagcgggagaaggccagtgcagccaaaagcagcctcatccaccaaggcatccgctgaagaccaacccatcacctcagttgttttttatttttctaataaagtcatgtctcccttcatgttttttttttaaa

SEQ ID NO: 57 - DNA, 2139 bp, Homo sapiens
cggggcggcggtgcccttgcggcgcagctggggtcgcggccctgctccccgcgctttcttaaggcccgcgggcggcgcaggagcggcactcgtggctgtggtggcttcggcagcggcttcagcagatcggcggcatcagcggtagcaccagcactagcagcatgttgagccgggcagtgtgcggcaccagcaggcagctggctccggttttggggtatctgggctccaggcagaagcacagcctccccgacctgccctacgactacggcgccctggaacctcacatcaacgcgcagatcatgcagctgcaccacagcaagcaccacgcggcctacgtgaacaacctgaacgtcaccgaggagaagtaccaggaggcgttggccaagggtaggttccaggctgagcggcgggaggcagtccccggcagaggcgaccccagggagccaggccccatacggacgggcctctccgtggaggagaactcgcttcgtatttgtaccggttccgagttttccaggcacgatagtctctcttttaaacacatggtctacctcattgtagaaggagtgcctcgatgggtttgaacacacttctgtcatctcagggaacttggggtcctgcgaaggagcttgccttactgttgtgagccacattccgttacacatattgccagcactggtgaattgtagggcctgaaaagaaagctctactgtgtcactcgttttttttgcaaattgaaattgttcttgttgtataatgtgctttggggaaatgtttggtctctcaggtaggtgtgccagccgtttgcaggagggctgagagcgcctgtccactggtggccagacatcatcgggtccgcaggtgtctctgagtgtcagggtcacctcctgatagaagtgggagtggtgtcttactgccaggtcacactgaaggtgggagacaggaggacactactccgtgctaggaaccatggtccttgtcatcttcctgagagcaaacggggtcgggactccagcctaggacttggagactccctgcatccccagctaccctgcaggtgaaacttcactgagcccacttgacttcaggtgggagaggaggaggcacaccgttgtggtgtgcgttaccaaaaaagcagtaacctaactgtggaacagttcaggatctttagacttgatacttttcttgatttcccttaggggtcaaagttcacaaggaaaatagccctttagtgggaaactgaaacaggcttgtttttatttactatttactcatatttgtaatgcaattaaaatatatgttgttaactttttttttttttctcaagagctcggttgataaaaccaggggtatgtggactttttgagtctgtgccttttgggggtgtgtatgggaatgttatgttttaacgttttttacaaaatagtattgtctttttaatttattcgttagtggtttgcacaaggaagataatcgatagtcatgttttttagactctctgtattgcttggtaagctacgtagtaaaaaatgtttacttttccttaaatgttttgaatttcggggttatgaaatttgttgagtaatttttagacagtcacatcttgttgactggaggcatctagtggaaaaatgcagtatttcagcctgattgtgtttgaagtaaatgattaaaagaggaggaagttaccacattctggaagatttacttgagacagacgaaccttgaattacgggaaaaggccccgtgatttaggaaataacaaatttgggaaacatgtaatggggagagactggggaataccccagttgtgaaagtacttcctgtaaggcaacatctgacaccaggaacctttctcttcagtattttaaaaacaacttaatttcagtcctttacttgtggaatcagagccttacttatgtaatacaacccactggaaaaaagctttttattgtattgtactatattgtttataagtgattgagtacctgcagagctttcttttacttaaacatattttaaaaattattaaaaagattttcatgtttgaaaacttggggaaaaaagataaaacaatgtcataatctcatcacatttaactgactaatatgaatatttttcaacaaaaaaaaaaaaaaa

SEQ ID NO: 58 - DNA, 9834 bp, Homo sapiens
ctctgctctggacttgggaggctccgttgcctgctcccggagggagacgcgctgccgaggagaacccagcgggagaacatttcaggataggaataggccaagtgctgagaagatgagtcttaggattgatgtggatacaaactttcctgagtgtgttgtagatgcaggaaaagtcacccttgggactcagcagaggcaggagatggaccctcgcctgcgggagaaacagaatgaaatcatcctgcgagcagtatgtgctctgctgaattctggtgggggcataatcaaggctgagattgagaacaaaggctacaattatgaacgtcatggagtaggattggatgtgcctccaattttcagaagccatttagataagatgcagaaggaaaaccactttttgatttttgtgaaatcatggaacacagaggctggtgtgccacttgctaccttatgctccaatttgtaccacagagagagaacatccaccgatgtcatggattctcaggaagctctggcattcctcaaatgcaggactcagactccaacgaatattaatgtttccaattcattaggtccacaggcagctcagggtagtgtacaatatgaaggtaacataaatgtgtcagctgctgctttatttgatagaaagcggcttcagtatctggaaaaactcaaccttcctgagtccacacatgttgaatttgtaatgttctcgacagacgtgtcacactgtgttaaagacagacttccgaagtgtgtttctgcatttgcaaatactgaaggaggatatgtattttttggtgtgcatgatgagacttgtcaagtgattggatgtgaaaaagagaaaatagaccttacgagcttgagggcttctattgatggctgtattaagaagctacctgtccatcatttctgcacacagaggcctgagataaaatatgtccttaacttccttgaagtgcatgataagggggccctccgtggatatgtctgtgcaatcaaggtggagaaattctgctgtgcggtgtttgccaaagtgcctagttcctggcaggtgaaggacaaccgtgtgagacaattgcccacaagagaatggactgcttggatgatggaagctgacccagacctttccaggtgtcctgagatggttctccagttgagtttgtcatctgccacgccccgcagcaagcctgtgtgcattcataagaattcggaatgtctgaaagagcagcagaaacgctactttccagtttcagcaagaaaaacatctgccagccagtgacccggaaaaccttcatgaaaaacaactttgaacacatccagcacattatcattgatgacgctcagaatttccgtactgaagatggggactggtatgggaaagcaaagttcatcactcagacagcaagggatggcccaggagttctctggatctttctggactactttcagacctatcacttgagttgcagtggcctcccccctccctcagaccagtatccaagagaagagatcaacagagtggtccgcaatgcaggtccaatagctaattacctacaacaagtaatgcaggaagcccgacaaaatcctccacctaacctcccccctgggtccctggtgatgctctatgaacctaaatgggctcaaggtgtcccaggcaacttagagattattgaagacttgaacttggaggagatactgatctatgtagcgaataaatgccgttttctcttgcggaatggttattctccgaaggatattgctgtgcttttcaccaaagcaagtgaagtggaaaaatataaagacaggcttctaacagcaatgaggaagagaaaactgtctcagctccatgaggagtctgatctgttactacagatcggtgatgcgtcggatgttctaaccgatcacattgtgttggacagtgtctgtcgattttcaggcctggaaagaaatatcgtgtttggaatcaatccaggagtagccccaccggctggggcctacaatcttctgctctgtttggcttctagggcaaaaagacatctgtatattctgaaggcttctgtgtgacaggaaacccaagcctaagaaacaattaagtggttctcatctctaattaactgtgaaaccatttaatccaaacatgtaagcacacactcacttattaagtcacatacttttctaggtgctggggattgagaacgaatcgatgtaagattcctcctttagggcagagacagaccactgacaaatacacagatagacaaggaatttcccatggtaaaaagggatatcagtaattagaggaccgtgagactcagagatgtgtgtgtgtgtgtgtgtgtgtgtgtgtgtgtgtgcgcgcgcgcacgtgcacatgtgtgtaggtagatggagggggtgattattttgggtggtcagggaagtgctcagtgagggaagaacttgtcatgagaatctctgagcgtgccaggcagactcggatatttttataaatttttaacatggccacttgcagaagagcttgaatgggacgtgcagcgagaatgtgaaggatggagcaggtagctcatctggccttgtaggtgccgggaacgggcaagacatgttttgaaatgtaagatcacagactgttttttgcaagaccacattatattactttattattttctgctttttcttttaacgacattagtgtttttgatcactatattttaaaatgctttttgtgagccttttggttatgtggaatctgttccttagctctgattttttattcttatggagcgtcttaggttactacatgaaggtaagactgccacagtcccccagggaggcacactgtgttttactgattgatttgaagatgatagagagcctagggggatgagtctattggactcaaaggttacattttgtttttccatttaatttaataatcaacaaaacgacaaagtcagtttaatatctttcttctgctgagtcttcaggatgttagctagtctttcaaaagccattgctacaaaagtgcaaatttctcatttcctgtgggtctctagaaactctctcaatatttaaagccaaacaaatccatcttttctgagagacagaaactaaaaaattcagagttaattcactattaaaaacagcaaggccctgctatttcccaagaataaagaaatttaaaattctcattgtaagaagtatgaacttgaagctagaattggtttatttctggcagctacttacaatattaagaactttactttttaaatttgagacaatttcacaggaaagcaagaaattagtctattgtgaaatgtttttacaactaacttggaatatactgcaaatcactagtaagtagagacacatttaagataaaatgattaataaaacaattggtaattctgaataaggatctgaataaatccagatcacagactgttcctttaccaatatgtaaaagaatgtgcaaaattagtaaaaatatacccaaaaatttaccagcaacagagaagcaaagaatggagttcaaccttacactataaacatctaatagatatgtatgaaaatttaaaaactagaaaaggttgggcatggtggctcatgcttgtgatcccaggactttaggaggccaaggtgggaggattgtttgagcccaggagttcaagaccagcttgagcaatatagtgagaccctgtctctacaaaaacaaacaaacaaacaaacaaataaataaataaataaaattagctgggaatggtgatgcacacctggagtcctagctactcagaaggctgaggcaggacgatcacttgacctcagaagtctgaggttacagtgagctatgatcataccagtgcactccagtctgggtgacagaacaagaccctgtctccaaaaattaaataaataaaacaaaaaaaaagaatttaaaagttttatataaaggcatagctactatctcatctgcccagtgtagtcatgaatagatgtcacataaagaaaagaaaaccagaattcttgttaatatggccagtttgaagggtggtggcggaggtattgagcaggcagctcagggaaatgccagggagacccttgagcacagaaactcctgattgtccccagggactctccgtggacacaggagggattttccaggatttcacatgaattcaatgaagggggctgtgtcttattcctggatgctttgcctccttcatggaattcagtggatttaatggaagttcctaggcaacaataaagagtagaaaccaggttaacagcgagggcctcatctcacaccagatcatatcaggctacacaaaagtagatggaagacaccacccaggcctccagctatacactggagaagaagccaaactagtctacttcatctaagaaagttgtcaaagagagcccttctatactatcttaaggtaaaaagaaagactctacccagctgccctgattaagcattagaaagataagtgttctgatcattaggcgaaagacaatggggaaaaatgtagaaaagaaatatgacatgagccagatgaagaacccatcctgaaaggatatataactcaggggacaaaagacaactcaccataagttgggcgcagtggatcacgcctgtaatctcagcattttggtaggccaaggcaggtggatcacctgaggtcaggagttcaagtccagcctggccaacgtggtgaaatcctgtctctactaaaaatacaaaaattagctgggtgtggtggtgcatgcctgtaataccagctactcagaaggctgaggcaagagaattgcttgaatcaaggaggcagaggttacagtgagccaagatcaggccattgtacttcagcctgggcgacaaagtgagaccctgtctcaaaaaacaaacaaagcctccccatagatgtctcctgccatagaagaatttaagaagttcataaattcaataaaacaagagttgaaggcctgtcccactgtacccaatttctccctctctgaactgcagcctagaaactctctacaggcagtaagctggggcagtcacagaggtgacctcatctgtttcccacatcctgcattaggacagtgatcagggatcagtatccttcattgactgatttccaatatctcgagacctgttgtttcatatattttgccttattttgcaattgtttcatatattttgtcttattttgcaattgtttcaggagggaggataaatatggtccctgttcctctatcttgaccagaagcatctaagaaggcagtgaagcaacatgtgtacagttcttagggaaacaaattttgacctaaaaatattaaacctagtcaaaatattattctagtacaaaggcagcacatgggtatttttgaacataaaagagttctagaaatacaggacccatgaatcattcttgaagaaaagttactcagtaaggaaatctagctaagcaagcaacatgtacaaataaaagattattataattggaccaaagttaagtttaaatccattcacatgtatataattaagatatataggaattataattacagaaaagaatgttacaaaccttcacaaagtaaaaatatttttatatcagatagattcttctgtttcaatccataaaaccagggtttggatcattttaaaaaaacaaacaaaaataatttattggaatcattagggaggacctgatagaataaaatgacaagctgaccaaataggccttagaagggagaggtgcctgggcagttacaaggacctaggtagcaggggtgacttggccacagtcattttctttacttgatttaaggaggttaaattacagtgagagagttgcacttatttagtttgcataccgtactcaactcttagctagcatagggcaggttccttagttgaaaaatttccacaaaacatgatgtaaagtggaaagatcagttcccccaaagaatatcagttaccaaagtaggatgaaaggatgttgggtagatcaaaacaacaaatgtccattacagcaattaacaaaagttagggagtggggaagtctgagtgctaatatggatttcaaaacaactttaaaaatggcttcaaacattttatgctttttgtaatttagtcattttaatattagataaatcttcctgtaactgaaagttcttgagttaaagaaaaatattcggtagttcagctcttccttcaattttattagttgctttttcttttgttcaagtgaaataaacataaaaataattttaaaatattatgtatcatatccttcgatttaacataattctatctagctgttcttatattttctctgatatatttttaaaagctttctggaatattattaaccttgaatatttctagttgatgagtttatgagtgatttattgcttccttttctctttcagtattgctagaattaattttattgactttgcccctttgcataaagaccttgaaggtcacatgctgaaatcgccctctactaaaacaaactcatagaaataatggggaagatatttcaaaacattgccatatgcatagccatcctcacaaccaagaaaagcgcctctccatgaactaaaacctatgagtcattggtacaggtagggaaaatctaggtaaaccacggtaatacactgaggctggcaccaccacaggccaggacaaccgttgtcacaaagccaggacagaatctcccagccagaaagtgttgccctgaggctgaagccaaattcattttgcccccagttggccagaccaaagcctagaactaaaaaacccatacctcagggtttgtcagcattggcactgctggctttttgggctggacaaccatttattgtgagaggcttctctatgcactgtaggatgtttagcagcatccttggccctactccctagacgccagtagcaaatccaccaccctccctcccctaccccagggttggttgtcagttgtgacaaccaaaaatgtctccagacatcgccaaatgtcccttggggggtaaaatcaccaccaccatacctcttttgactaaaagagtttccagaatagtggcagaatatataggtcaagcataacacattacaatcaagattcagaacatcaaagattcttttttaatcctaaaagaaaaagtttggaaaatctacaaaaagaagtgtgaatttgacaataactatttcactagcaagggtagacgtaagcagaatacaggtagcatattcaaactgctgtggaaaaacaacatcaaacctagacttctctccccaaactatcattcagagtcgagggcaaaataaatagattttctgacttggaacaagtaggaataatgtacttatagtattcatcttcatacagggatggactataagtgatttttaaaaaacttcctacttgttccaagtcagaaaaactattcatatagggatgggctattagcaagagtatatgaataacgtactataacaagaaaaaatgaattgagaagaaagtagtggttttaagaaggaaaggagaacaaataaattagtgaaacataaggttaagtctatacatattattttctaattgcctattatgtcagactacatgtagttagaaaatacgatgaaagaaaaagccatattataattccaacaaaaagataaaataattaagaataactgcaacaagaaaatataagttctgcaacaataaaactatacaatgaaactaaagagcacaaaaaagaacttaaacagataaaaagcagaccacgtttttggataagaagattaaaaattataaatatatcaattttcactgttaatctataaattcagtgtaatcccaataaaaatgccaacaggttttccccaatagcattgaaatgattttaaaatttaatgaaggccaagcatggtggctcactcctgtaatcccagcactttgagaggccgaggcaggtggattgcctgagtccaggagttccagaccagcctggacaacatggtgaaatcccgtctctatttaaaatgcaagaaattagctgggtgtggtggtgtgcacctatagtcctagctactcgggaggctgaggtgggagaatcacccaagccttgggaggtcgaggctgtagtgagccaaaatcacatcactgcactccagtctgggcagccagagtgagaccctgtctcaaaaaaaaaaaaattattggaaactacgaggcaagaatatccaagaaaaatctagaaaagaagaaacctgagtgagtcagcatgaccaaatattaaaacatcttataaagctacaataattaaaacaatgtggtgctgatatgtggagggtcaatggaacaagatgaaatggccaaaaataaatttaaaatacatgttgaaatgtattaacagcatatgttaaagttaagttatgttaactttatatgttaaattcaagttaattggggaaagatggattattcaatatatgatgaacaactctgtcacccagctaaaaaaaattaagcttgggccatatgccagactagataccaaaataaattccaggaggaccaagtttttaaaagtaaaaatatggaatcatggaagtgcatgaagaagaagtagcacttaaaaaaataataatctcagcatggggaaggtctaagtatggccctcaatcagaaaccaggaaggaaaatattgactattttaaacaaaattatctctgtaccaaaaacagcataaaaggtcaagaaacaacacactggaaaaagaattgcaatgaatatcacagccaaatagttaatttcttattttcaaaaaatagcttctacaaatcgaagagaaaaattctaaggtctcaaaggaaaaatgagcaaaggatttgacaggtggtagaatacagaaaaagaatttaaaatagctcctaaagatatggaaacattactcatgatagcagaagtatcaattgacaaaattactcagattggtaacaaactttaagggggaaagcacttccatgcattgctgtaaattggtacatcttctactgagaacaatccggcagtagttaacaaaattgtgaatgcatatatctctttctctagaaatttctcttttgggaatttattctacatatatattcaaacgtgtgaaatacttctatacaggtgattgaatttcactttattcctaagagcagaagactgcaaaatagtaaatatatacccaaaagggtctaatggattagtttttggcatatcagcacatgataatactatgaagccataaaaaagagagatctctatatgtattgatgggggaccatctttaagatatactgtggtgttgaacaaaacaacatgctgaaaatgtctcttattcttttagaatcaatataagtctgtgcttgtaaatgcagtaagtatctttggaagtatacctaaaaattggtaatagtgtttgactccagggaagaacagatgggtgccagagtgaaaaaaagatagcttttgctttttatgacttttggattctgtaccacgtaataattttgatgtaaattttgctgtgtgtgtttttacttgttcatgtagtgattttataaattactcttttaattttctatcaatgaatatcctgggataaacccctcatgatcataatgaataatgatgtgtggagagtggggagggtttacatatgaaaaatgtagaaaatacaaaaagtgtctatatatacaaaaatgtaagtgttaacatttttatatttgcttcaagctttttttttaaataaaagaaatgcaatattgcaattaaa

SEQ ID NO: 59 - DNA, 672 bp, Homo sapiens
acaaactttcagagacagcagagcacacaagcttctaggacaagagccaggaagaaaccaccggaaggaaccatctcactgtgtgtaaacatgacttccaagctggccgtggctctcttggcagccttcctgatttctgcagctctgtgtgaaggtgcagttttgccaaggagtgctaaagaacttagatgtcagtgcataaagacatactccaaacctttccaccccaaatttatcaaagaactgagagtgattgagagtggaccacactgcgccaacacagaaattattgtaaagctttctgatggaagagagctctgtctggaccccaaggaaaactgggtgcagagggttgtggagaagtttttgaagaggtaagttatatattttttaatttaaatttttcatttatcctgagacatataatccaaagtcagcctataaatttctttctgttgctaaaaatcgtcattaggtatctgcctttttggttaaaaaaaaaaggaatagcatcaatagtgagtttgttgtactcatgaccagaaagaccatacatagtttgcccaggaaattctgggtttaagcttgtgtcctatactcttagtaaagttctttgtcactcccagtagtgtcctattttagatgataatttctttgatctccctatttata

SEQ ID NO: 60 - DNA, 4615 bp, Homo sapiens
acttgcctgatatttccagtgtcagagggacacagccaacgtggggtcccttctaggctgacagccgctctccagccactgccgcgagcccgtctgctcccgccctgcccgtgcactctccgcagccgccctccgccaagccccagcgcccgctcccatcgccgatgaccgcggggaggaggatggagatgctctgtgccggcagggtccctgcgctgctgctctgcctgggtttccatcttctacaggcagtcctcagtacaactgtgattccatcatgtatcccaggagagtccagtgataactgcacagctttagttcagacagaagacaatccacgtgtggctcaagtgtcaataacaaagtgtagctctgacatgaatggctattgtttgcatggacagtgcatctatctggtggacatgagtcaaaactactgcaggtgtgaagtgggttatactggtgtccgatgtgaacacttctttttaaccgtccaccaacctttaagcaaagaatatgtggctttgaccgtgattcttattattttgtttcttatcacagtcgtcggttccacatattatttctgcagatggtacagaaatcgaaaaagtaaagaaccaaagaaggaatatgagagagttacctcaggggatccagagttgccgcaagtctgaatggcgccatcaaacttatgggcagggataacagtgtgcctggttaatattaatattcccattttattaataatatttatgttgggtcaagtgttaggtcaataacactgtattttaatgtacttgaaaaatgtttttatttttgttttatttttgacagactatttgctaatgtataatgtgcagaaaatatttaatatcaaaagaaaattgatatttttatacaagtaatttcctgagctaaatgcttcattgaaagcttcaaagtttatatgcctggtgcacagtgcttagaagtaagcaattcccaggtcatagctcaagaattgttagcaaatgacagatttctgtaagcctatatatatagtcaaatcgatttagtaagtatgttttttatgttcctcaaatcagtgataattggtttgactgtaccatggtttgatatgtagttggcaccatggtatcatatattaaaacaataatgcaattagaatttgggagaagcaaatataggtcctgtgttaaacactacacatttgaaacaagctaaccctggggagtctatggtctcttcactcaggtctcagctataattctgttatatgaggggcagtggacagttccctatgccaactcacgactcctacaggtactagtcactcatctaccagattctgcctatgtaaaatgaattgaaaaacaattttctgtaatcttttatttaagtagtgggcatttcatagcttcacaatgttccttttttgtatattacaacatttatgtgaggtaattattgctcaacagacaattagaaaaaagtccacacttgaagcctaaatttgtgctttttaagaatatttttagactatttctttttataggggctttgctgaattctaacattaaatcacagcccaaaatttgatggactaattattattttaaaatatatgaagacaataattctacatgttgtcttaagatggaaatacagttatttcatcttttattcaaggaagttttaactttaatacagctcagtaaatggcttcttctagaatgtaaagttatgtatttaaagttgtatcttgacacaggaaatgggaaaaaacttaaaaattaatatggtgtatttttccaaatgaaaaatctcaattgaaagcttttaaaatgtagaaacttaaacacaccttcctgtggaggctgagatgaaaactagggctcattttcctgacatttgtttattttttggaagagacaaagatttcttctgcactctgagcccataggtctcagagagttaataggagtatttttgggctattgcataaggagccactgctgccaccacttttggattttatgggaggctccttcatcgaatgctaaacctttgagtagagtctccctggatcacataccaggtcagggaggatctgttcttcctctacgtttatcctggcatgtgctagggtaaacgaaggcataataagccatggctgacctctggagcaccaggtgccaggacttgtctccatgtgtatccatgcattatataccctggtgcaatcacacgactgtcatctaaagtcctggccctggcccttactattaggaaaataaacagacaaaaacaagtaaatatatatggtcatatacatattgtatatatattcatatacaaacatgtatgtatacatgaccttaatggatcatagaattgcagtcatttggtgctctgctaaccatttatataaaacttaaaaacaagagaaaagaaaaatcaattagatctaaacagttatttctgtttcctatttaatacagctgaagtcaaaatatgtaagaacacattttaaatactctacttacagttggccctctgtggttagttccacatctgtggattcaaccaaccaaggacggaaaatgcttaaaaaataatacaacaacaacaaaaaatacattataacaactatttacttttttttttttctttttgagatggagtctcgctctgttgcccaggttggagtgcagtggcacgatctcggctcactgcaacctcacctcccgggttcaagagatcctcctgcctcagcctcctgagcagctgggactacaggcgcatgccaccatgcccagctaatttttgtatttttagtagaggcggggtttcaccatgttggccaggatggtctcaatctcctaaccttgagatccaccctccacagcctcccaaactgctgggattacaggtgtgagccaccgcacgtagcatttacattaggtattacaagtaatgtaaagatgatttaagtatacaggaggatgtgaataggttatatgcaagcactatgcccttttatataagtgacttgaacatctgtgcccgattttagtatgtgcaggggggcgatctgggaatcagtcccctgtggataccaaggtacaactgtatttattaacgcttactagatgtgaggagagtctgaatattttcagtgatcttggctgtttcaaaaaaatctattgacttttcaataaatcagctgcaatccatttatttcatttacaaaagatttattgtaagcatctcaatcttggtttgtcagtttatcttaagcatgtcaattcataaaaacaagtcatttttgtatttttcatctttaagaatgcttaaaaaagctaatccctaaaatagttagatctttgtaaatgcatattaaataataaagtatgacccacattactttttatgggtgaaaataagacaaaaataatagttttagtgaggatggtgctgagtaaacataaaaactgatttgctctcagctgatgtgtcctgtacacagtgggaagattttagttcacacttagtctaactcccccattttacagatttctcactatatatatttctagaaggggctatgcatattcaatgtattgagaaccaaagcaaccacaaatgcataaatgcataatttatggtcttcaaccaaggccacataataacccagttaacttactctttaaccaggaatattaagttctataactagtactcaaggtttaaccttaaaattaagatttccttaaccttaaccttaaaattgatattatattaaacatacataatacaatgtaactccactgttctcctgaatattttttgctctaatctctctgccgaaagtcaaagtgatgggagaattggtatactggtatgactacgtcttaagtcagatttttatttatgagtctttgagactaaattcaatcaccaccaggtatcaaatcaacttttatgcagcaaatatatgattctagtgtctgacttttgttaaattcagtaatgcagtttttaaaaacctgtatctgacccactttgtaatttttgctccaatatccattctgtagacttttgaaaaaaaagtttttaatttgatgcccaatatattctgaccgttaaaaaattcttgttcatatgggagaagggggagtaatgacttgtacaaacagtatttctggtgtatattttaatgtttttaaaaagagtaatttcatttaaatatctgttattcaaatttgatgatgttaaatgtaatataatgtattttctttttattttgcactctgtaattgcactttttaagtttgaagagccattttggtaaacggtttttattaaagatgctatggaacataaagttgtattgcatgcaatttgaagtaacttatttgactatgaatgttatcggattactgaattgtatcaatttgtttgtgttcaatatcagctttgataattgtgtaccttaagatattgaaggagaaaatagataatttacaagatattattaatttttatttatttttcttgggaattgaaaaaaattgaaataaataaaaatgcattgaacatcttgcattcaaaa

SEQ ID NO: 61 - DNA, 2240 bp, Homo sapiens
atctttggtccagtgcggtggcggcggcggcggtggcggcggcgactgctgcggtgaaggaggaggaggagccgagcgggcgctggcaccgaggcctgaccatggacgaggaatacgatgtgatcgtgctggggaccggtctcaccgaatgcatcctgtcgggcatcatgtctgtgaacgggaagaaggtgctgcacatggaccggaacccctactacgggggcgagagctcctccatcacacccctggaggagctgtataagcgttttcagttgctggaggggccccctgagtcgatgggccgaggccgagactggaatgttgacctgattcccaaattcctcatggctaacgggcagctggtaaagatgctactgtatacagaggtgactcgctacctggacttcaaggtggtggagggcagctttgtctacaaggggggcaagatctacaaagtgccgtccactgagactgaggccttggcttccaatctgatgggcatgtttgagaaacggcgcttccgcaagttcctggtgtttgtggcaaacttcgatgagaatgaccccaagacctttgagggcgttgacccccagactaccagcatgcgtgacgtctaccggaagtttgatctgggccaggatgtcatcgatttcactggccatgccctggcgctctaccgcactgatgactacctggaccagccctgccttgagaccgtcaaccgcatcaagttgtacagtgagtccctggcccggtatggcaagagcccatatttatacccgctctacggcttgggcgagctgccccagggttttgcaagattgagtgccatctatggggggacatatatgctgaacaaacctgtggatgacatcatcatggagaacggcaaggtggtgggcgtgaagtctgagggagaggtggcccgctgcaagcagctgatctgtgaccccagctacatcccggaccgtgtgcggaaggctggccaggttatccgcatcatctgtatccttagccaccccatcaagaacaccaacgacgccaactcctgccaaataatcatcccccagaaccaggtcaacaggaagtcagacatctacgtgtgcatgatctcctatgcacacaacgtggcggcccagggcaagtacatagctattgccagcactactgtggagaccacggaccctgaaaaggaggtggagccggctctggagctgttggagcccattgaccagaagtttgtggctatcagtgacttgtatgagcccattgatgatggttgtgagagccaggtgttctgttcctgctcctacgatgccaccacacactttgagacaacctgcaacgacatcaaagacatctacaaacgcatggctggcacggcctttgactttgagaacatgaagcgcaaacagaacgacgtctttggagaagctgagcagtgattgtggccgcccccagcccctgctgccccagcctgtgtctgttctcctcgagggctccagcatcctctgcttcccccaccacgttcccatcacccacctcattgatccactgaccaaatccttaaccctagcgatggcttgggagatggggggttggatagcatcctctttcttggcccttccttatcctaggaaaagagggttcctctccttgtgtgtgtctcttccccccacccctaattcttctgctctgtttgggaagacgtggaggaaaaggtgacttctgcccccaccgctcttacccccactgtagtggcctttggagatgcccccacctcccccccaccaactctcgcgtgttggagagaaggggccctcccagcacaaagttgcattcctcccccctaatttattctaatttattaactttgacccaccctttctgagcctgcagccttcccgtgtggcctgagggctgtcgagtgagctgccccagcccctcccagcccttgcccagcctgggggagtggggaaggcttgggcatggccccgttggaggttgatttgctgttttgtttcttgtctttgtgttctgtggtacttgctgagagaaaagaaaagtgagccaagcagaaggaggtgggaaaacggacccaaaccccagtgtgccctgccccatgcctttcctttagtggtgggaaacccttatcttgcaaagtgaatgtgtccccttccccaccctctagtgtatttcacagaaaacaaaacctcccaataaaacggttgaaacctgaa

SEQ ID NO: 62 - DNA, 2319 bp, Homo sapiens
gcggaactttccagaacgctcggtgagaggcggaggagcggtaactaccccggctgcgcacagctcggcgctccttcccgctccctcacacaccggcctcagcccgcaccggcagtagaagatggtgaaagaaacaacttactacgatgttttgggggtcaaacccaatgctactcaggaagaattgaaaaaggcttataggaaactggctttgaagtaccatcctgataagaacccaaatgaaggagagaagtttaaacagatttctcaagcttacgaagttctctctgatgcaaagaaaagggaattatatgacaaaggaggagaacaggcaattaaagagggtggagcaggtggcggttttggctcccccatggacatctttgatatgttttttggaggaggaggaaggatgcagagagaaaggagaggtaaaaatgttgtacatcagctctcagtaaccctagaagacttatataatggtgcaacaagaaaactggctctgcaaaagaatgtgatttgtgacaaatgtgaaggtagaggaggtaagaaaggagcagtagagtgctgtcccaattgccgaggtactggaatgcaaataagaattcatcagataggacctggaatggttcagcaaattcagtctgtgtgcatggagtgccagggccatggggagcggatcagtcctaaagatagatgtaaaagctgcaacggaaggaagatagttcgagagaagaaaattttagaagttcatattgacaaaggcatgaaagatggccagaagataacattccatggtgaaggagaccaagaaccaggactggagccaggcgatattatcattgtgttagatcagaaggaccatgctgtttttactcgacgaggagaagaccttttcatgtgtatggacatacagctcgttgaagcactgtgtggcttccagaagccaatatctactcttgacaaccgaaccatcgtcatcacctctcatccaggtcagattgtcaagcatggagatatcaagtgtgtactaaatgaaggcatgccaatttatcgtagaccatatgaaaagggtcgcctaatcatcgaatttaaggtaaactttcctgagaatggctttctctctcctgataaactgtctttgctggaaaaactcctacccgagaggaaggaagtggaagagactgatgagatggaccaagtagaactggtggactttgatccaaatcaggaaagacggcgccactacaatggagaagcatatgaggatgatgaacatcatcccagaggtggtgttcagtgtcagacctcttaatgggccagtgaataacactcactgctggcatttaatgtgcagtagtgaatgagtgaaggactgtaatcataatatgctcactacttgctcttgtttttgttttaataaactatagtagtgttttaaaaagttaaatgaagaataaacgcaaatataaaagctctgattttgccctgtatgtatgatgacttcagtgtgcaagatgaagtttaatacctgtaaaaactacaaagaagttcccctagcatttctaggccaaaccttgtaattgacttcagctatgtacgtggacaagcttagactgaaatgctaggtatatgtattggcttcagtgtatgacccttcattgttaagctatgaaagtaaaactctgtatttaactggcaatgaggaaaaaaaaattttgtagagaagtgttggtctgtatagttctttatattaagtgggattcattgtaatgcctctgcatttattctgttgcctcagctgttacttgaagatggcgtaatatataatttatcctgtggtatcagtgataaaaatgatacctttctgtaggaggggtttatcataatatgctgcttcttgaaggcttgcacttccagaattgtgtttccttctgctgtgccattcatatatatatacatatatatatataatcttgaccagtcctggtcatttgctcccctccttgtctgtggaccatgataagcccaagtagtgacttcagagctgggtaacagaaattaaagtgaaaagacctttacgtggagaatttgcatgcgtaatataggaaggtgttctttaggtatgttacaggattactttaaaccatttgactttcgctccaaagttatgttggtagtatagcaaattatgatgaatagctttaattgtatgtttaaaagtctcatatgttcacatgcttaaatctgggtatcagaatttaagcaattcttgaaatgtattgtctccttaatatactaattacaaagcatctccaa

SEQ ID NO: 63 - DNA, 3393 bp, Homo sapiens
ggcagaagaggaagatttctgaagagtgcagctgcctgaaccgagccctgccgaacagctgagaattgcactgcaaccatgagtgagaacaataagaattccttggagagcagcctacggcaactaaaatgccatttcacctggaacttgatggagggagaaaactccttggatgattttgaagacaaagtattttaccggactgagtttcagaatcgtgaattcaaagccacaatgtgcaacctactggcctatctaaagcacctcaaagggcaaaacgaggcagccctggaatgcttacgtaaagctgaagagttaatccagcaagagcatgctgaccaggcagaaatcagaagtctggtcacctggggaaactatgcctgggtctactatcacatgggccgactctcagacgttcagatttatgtagacaaggtgaaacatgtctgtgagaagttttccagtccctatagaattgagagtccagagcttgactgtgaggaagggtggacacggttaaagtgtggaggaaaccaaaatgaaagagcgaaggtgtgctttgagaaggctctggaaaagaagccaaagaacccagaattcacctctggactggcaatagcaagctaccgtctggacaactggccaccatctcagaacgccattgaccctctgaggcaagccattcggctgaatcctgacaaccagtaccttaaagtcctcctggctctgaagcttcataagatgcgtgaagaaggtgaagaggaaggtgaaggagagaagttagttgaagaagccttggagaaagccccaggtgtaacagatgttcttcgcagtgcagccaagttttatcgaagaaaagatgagccagacaaagcgattgaactgcttaaaaaggctttagaatacataccaaacaatgcctacctgcattgccaaattgggtgctgctatagggcaaaagtcttccaagtaatgaatctaagagagaatggaatgtatgggaaaagaaagttactggaactaataggacacgctgtggctcatctgaagaaagctgatgaggccaatgataatctcttccgtgtctgttccattcttgccagcctccatgctctagcagatcagtatgaagacgcagagtattacttccaaaaggaattcagtaaagagcttactcctgtagcgaaacaactgctccatctgcggtatggcaactttcagctgtaccaaatgaagtgtgaagacaaggccatccaccactttatagagggtgtaaaaataaaccagaaatcaagggagaaagaaaagatgaaagacaaactgcaaaaaattgccaaaatgcgactttctaaaaatggagcagattctgaggctttgcatgtcttggcattccttcaggagctgaatgaaaaaatgcaacaagcagatgaagactctgagaggggtttggagtctggaagcctcatcccttcagcatcaagctggaatggggaatgaagaatagagatgtggtgcccactaggctactgctgaaagggagctgaaattcctccaccaagttggtattcaaaatatgtaatgactggtatggcaaaagattggactaagacactggccataccactggacagggttatgttaacacctgaattgctgggtcttgagagagcccaaggagttctgggagagggaccagattggggggtaggtccacgggcttggtgatagaattatttctcgattgacttcttgagtgcaatttgaactgtaacatttgcttagtcacctttagtggagtaatctactgggcttgtttctatatttatataaagcagccaaatccttcatgtaatattgaagtccatttttgcaatgttgttccatacttggagtcattttgcatcccatagaggttagtcctgcatagccagtaatgtgctaagttcatccaaaagctggcggaccaaagtctaaatagggctcagtatcccccatcgcttatctctgcctccttcctcctccttcccagtctatcatcaaccttgagtattctacacaatgtgaattcaagtgcctgattaattgaggtggcaacatagtttgagacgagggcagagaacaggaagatacatagctagaagcgacgggtacaaaaagcaatgtgtacaagaagactttcagcaagtatacagagagttcacctctactctgccctcctcatagtcataatgtagcaagtaaagaatgagaatggattctgtacaatacactagaaaccaacataatgtatttctttaaaacctgtgtgaaaaaataaatgttccaccagtagggataggggaaaagtaaccaaaagagagaaagagaaaggaatgctggtttatctttgtagattgtaatcgaatggagaaatttgcagtattttagccactattaggaattttttttttttgtaaaatgaagactgaactctgttcaaatgctttcatgaacctggtttgagacggtaggaaagcaacaaaacgtgggaacctggtgactaagggcctggtgcaaggacttgggaaatgtcattgataatagatggtggggttttcccccctttagaaatgttggatattaagtgatataaacacttcttttaactccgaaaatcttctgagaaatcacaaaattcacggtatgcttggaacgattgagattttctaggtagatgctgaatagcctagacatcaaagttggtgtgaaccaaaatagagtcagctgacccagcatcagccacactctgggttggaaaatgtttgcctgttggaattaatttaagcttaagtatatatcaacattattttattgtgcaattaaaacaatacaaattcatggttttttaaagttaaaaattctaaccactgtaacaacagtttttgtgttattttctgtattaaacatcttgttgcacgcatttgaggtcatcagggtgcaaaatttgtattcctgaaaatgtcatatattttcattaataaataacctaaatatgataaaacataaagcagtgttctggttcatctggaattttgctgtactttaaatctttcagactcagctactgataaatgaaacgttacacaggtgtgaaccaaatccaaataacctcgactggtctactatcataatcacctgaacagaacaaaactttttcctcagctttaagagtccagggcttcggataacagctgccatctgccacctgctaccattgacctacgtgaacacagacattctgtctccaccttgatggtgggtgggctgctccccttttctttgttaaattttgtgctttcatcacattttctctattctgacctctgttatgagaaataaaagtcactgattcca

SEQ ID NO: 64 - DNA, 2390 bp, Homo sapiens
gcagacaggaagacttctgaagaacaaatcagcctggtcaccagcttttcggaacagcagagacacagagggcagtcatgagtgaggtcaccaagaattccctggagaaaatccttccacagctgaaatgccatttcacctggaacttattcaaggaagacagtgtctcaagggatctagaagatagagtgtgtaaccagattgaatttttaaacactgagttcaaagctacaatgtacaacttgttggcctacataaaacacctagatggtaacaacgaggcagccctggaatgcttacggcaagctgaagagttaatccagcaagaacatgctgaccaagcagaaatcagaagtctagtcacttggggaaactacgcctgggtctactatcacttgggcagactctcagatgctcagatttatgtagataaggtgaaacaaacctgcaagaaattttcaaatccatacagtattgagtattctgaacttgactgtgaggaagggtggacacaactgaagtgtggaagaaatgaaagggcgaaggtgtgttttgagaaggctctggaagaaaagcccaacaacccagaattctcctctggactggcaattgcgatgtaccatctggataatcacccagagaaacagttctctactgatgttttgaagcaggccattgagctgagtcctgataaccaatacgtcaaggttctcttgggcctgaaactgcagaagatgaataaagaagctgaaggagagcagtttgttgaagaagccttggaaaagtctccttgccaaacagatgtcctccgcagtgcagccaaattttacagaagaaaaggtgacctagacaaagctattgaactgtttcaacgggtgttggaatccacaccaaacaatggctacctctatcaccagattgggtgctgctacaaggcaaaagtaagacaaatgcagaatacaggagaatctgaagctagtggaaataaagagatgattgaagcactaaagcaatatgctatggactattcgaataaagctcttgagaagggactgaatcctctgaatgcatactccgatctcgctgagttcctggagacggaatgttatcagacaccattcaataaggaagtccctgatgctgaaaagcaacaatcccatcagcgctactgcaaccttcagaaatataatgggaagtctgaagacactgctgtgcaacatggtttagagggtttgtccataagcaaaaaatcaactgacaaggaagagatcaaagaccaaccacagaatgtatctgaaaatctgcttccacaaaatgcaccaaattattggtatcttcaaggattaattcataagcagaatggagatctgctgcaagcagccaaatgttatgagaaggaactgggccgcctgctaagggatgccccttcaggcataggcagtattttcctgtcagcatctgagcttgaggatggtagtgaggaaatgggccagggcgcagtcagctccagtcccagagagctcctctctaactcagagcaactgaactgagacagaggaggaaaacagagcatcagaagcctgcagtggtggttgtgacgggtaggacgataggaagacagggggccccaacctgggattgctgagcagggaagctttgcatgttgctctaaggtacatttttaaagagttgttttttggccgggcgcagtggctcatgcctgtaatcccagcactttgggaggccgaggtgggcggatcacgaggtctggagtttgagaccatcctggctaacacagtgaaatcccgtctctactaaaaatacaaaaaattagccaggcgtggtggctggcacctgtagtcccagctacttgggaggctgaggcaggagaatggcgtgaacctggaaggaagaggttgcagtgagccaagattgcgcccctgcactccagcctgggcaacagagcaagactccatctcaaaaaaaaaaaaaaaaaaaaaaaagagttgttttctcatgttcattatagttcattacagttacatagtccgaaggtcttacaactaatcactggtagcaataaatgcttcaggcccacatgatgctgattagttctcagttttcattcagttcacaatataaccaccattcctgccctccctgccaagggtcataaatggtgactgcctaacaacaaaatttgcagtctcatctcattttcatccagacttctggaactcaaagattaacttttgactaaccctggaatatctcttatctcacttatagcttcaggcatgtatttatatgtattcttgatagcaataccataatcaatgtgtattcctgatagtaatgctacaataaatccaaacatttcaactctgtta

SEQ ID NO: 65 - DNA, 2278 bp, Homo sapiens
agaccgcgagcgagagcgcccccgagcagcgcccgcgccctccgcgccttctccgccgggacctcgagcgaaagacgcccgcccgccgcccagccctcgcctccctgcccaccgggcccaccgcgccgccaccccgaccccgctgcgcacggcctgtccgctgcacaccagcttgttggcgtcttcgtcgccgcgctcgccccgggctactcctgcgcgccacaatgagctcccgcatcgccagggcgctcgccttagtcgtcacccttctccacttgaccaggctggcgctctccacctgccccgctgcctgccactgccccctggaggcgcccaagtgcgcgccgggagtcgggctggtccgggacggctgcggctgctgtaaggtctgcgccaagcagctcaacgaggactgcagcaaaacgcagccctgcgaccacaccaaggggctggaatgcaacttcggcgccagctccaccgctctgaaggggatctgcagagctcagtcagagggcagaccctgtgaatataactccagaatctaccaaaacggggaaagtttccagcccaactgtaaacatcagtgcacatgtattgatggcgccgtgggctgcattcctctgtgtccccaagaactatctctccccaacttgggctgtcccaaccctcggctggtcaaagttaccgggcagtgctgcgaggagtgggtctgtgacgaggatagtatcaaggaccccatggaggaccaggacggcctccttggcaaggagctgggattcgatgcctccgaggtggagttgacgagaaacaatgaattgattgcagttggaaaaggcagctcactgaagcggctccctgtttttggaatggagcctcgcatcctatacaaccctttacaaggccagaaatgtattgttcaaacaacttcatggtcccagtgctcaaagacctgtggaactggtatctccacacgagttaccaatgacaaccctgagtgccgccttgtgaaagaaacccggatttgtgaggtgcggccttgtggacagccagtgtacagcagcctgaaaaagggcaagaaatgcagcaagaccaagaaatcccccgaaccagtcaggtttacttacgctggatgtttgagtgtgaagaaataccggcccaagtactgcggttcctgcgtggacggccgatgctgcacgccccagctgaccaggactgtgaagatgcggttccgctgcgaagatggggagacattttccaagaacgtcatgatgatccagtcctgcaaatgcaactacaactgcccgcatgccaatgaagcagcgtttcccttctacaggctgttcaatgacattcacaaatttagggactaaatgctacctgggtttccagggcacacctagacaaacaagggagaagagtgtcagaatcagaatcatggagaaaatgggcgggggtggtgtgggtgatgggactcattgtagaaaggaagccttgctcattcttgaggagcattaaggtatttcgaaactgccaagggtgctggtgcggatggacactaatgcagccacgattggagaatactttgcttcatagtattggagcacatgttactgcttcattttggagcttgtggagttgatgactttctgttttctgtttgtaaattatttgctaagcatattttctctaggcttttttccttttggggttctacagtcgtaaaagagataataagattagttggacagtttaaagcttttattcgtcctttgacaaaagtaaatgggagggcattccatcccttcctgaagggggacactccatgagtgtctgtgagaggcagctatctgcactctaaactgcaaacagaaatcaggtgttttaagactgaatgttttatttatcaaaatgtagcttttggggagggaggggaaatgtaatactggaataatttgtaaatgattttaattttatattcagtgaaaagattttatttatggaattaaccatttaataaagaaatatttacctaatatctgagtgtatgccattcggtatttttagaggtgctccaaagtcattaggaacaacctagctcacgtactcaattattcaaacaggacttattgggatacagcagtgaattaagctattaaaataagataatgattgcttttataccttcagtagagaaaagtctttgcatataaagtaatgtttaaaaaacatgtattgaacacgacattgtatgaagcacaataaagattctgaagctaaa

SEQ ID NO: 66 - DNA, 1175 bp, Homo sapiens
gagacattcctcaattgcttagacatattctgagcctacagcagaggaacctccagtctcagcaccatgaatcaaactgccattctgatttgctgccttatctttctgactctaagtggcattcaaggagtacctctctctagaactgtacgctgtacctgcatcagcattagtaatcaacctgttaatccaaggtctttagaaaaacttgaaattattcctgcaagccaattttgtccacgtgttgagatcattgctacaatgaaaaagaagggtgagaagagatgtctgaatccagaatcgaaggccatcaagaatttactgaaagcagttagcaaggaaaggtctaaaagatctccttaaaaccagaggggagcaaaatcgatgcagtgcttccaaggatggaccacacagaggctgcctctcccatcacttccctacatggagtatatgtcaagccataattgttcttagtttgcagttacactaaaaggtgaccaatgatggtcaccaaatcagctgctactactcctgtaggaaggttaatgttcatcatcctaagctattcagtaataactctaccctggcactataatgtaagctctactgaggtgctatgttcttagtggatgttctgaccctgcttcaaatatttccctcacctttcccatcttccaagggtactaaggaatctttctgctttggggtttatcagaattctcagaatctcaaataactaaaaggtatgcaatcaaatctgctttttaaagaatgctctttacttcatggacttccactgccatcctcccaaggggcccaaattctttcagtggctacctacatacaattccaaacacatacaggaaggtagaaatatctgaaaatgtatgtgtaagtattcttatttaatgaaagactgtacaaagtagaagtcttagatgtatatatttcctatattgttttcagtgtacatggaataacatgtaattaagtactatgtatcaatgagtaacaggaaaattttaaaaatacagatagatatatgctctgcatgttacataagataaatgtgctgaatggttttcaaaataaaaatgaggtactctcctggaaatattaagaaagactatctaaatgttgaaagatcaaaaggttaataaagtaattataactaa

SEQ ID NO: 67 - DNA, 3431 bp, Homo sapiens
agtcgtcccgcgccggagccggccccgtagcgtgccatggcctgctacatctaccagctgccctcctgggtgctggacgacctgtgccgcaacatggacgcgctcagcgagtgggactggatggagttcgcctcctacgtgatcacagacctgacccagctgcggaagatcaagtccatggagcgggtgcagggtgtgagcatcacgcgggagctgctgtggtggtggggcatgcggcaggccaccgtccagcaacttgtggacctcctgtgccgcctggagctctaccgggctgcccagatcatcctgaactggaaaccggctcctgaaatcaggtgtcccattccagccttccctgactctgtgaagccagaaaagcctttggcagcttctgtaagaaaggctgaggatgaacaggaagaggggcagcctgtgaggatggccacctttccaggcccagggtcctctccagccagagcccaccagccggcctttctccagcctcctgaagaagatgcccctcattccttgagaagcgacctccccacttcgtctgattcaaaggacttcagcacctccattcctaagcaggaaaaacttttgagcttggctggagacagccttttctggagtgaggcagacgtggtccaggcaaccgatgacttcaatcaaaaccgcaaaatcagccaggggacctttgctgacgtctacagagggcacaggcacgggaagccattcgtcttcaagaagctcagagagacagcctgttcaagtccaggatcaatcgaaagattcttccaggcagagttgcagatttgtcttagatgctgccaccccaatgtcttacctgtgctgggcttctgtgctgcaagacagtttcacagcttcatctacccctacatggcaaatggttccctacaggacagactgcagggtcagggtggctcggaccccctcccctggccccagcgtgtcagcatctgctcagggctgctctgtgccgtcgagtacctgcatggtctggagatcatccacagcaacgtcaagagctctaatgtcttgctggaccaaaatctcacccccaaacttgctcacccaatggctcatctgtgtcctgtcaacaaaaggtcaaaatacaccatgatgaagactcacctgctccggacgtcagccgcgtatctgccagaggatttcatccgggtggggcagctgacaaagcgagtggacatcttcagctgtggaatagtgttggccgaggtcctcacgggcatccctgcaatggataacaaccgaagcccggtttacctgaaggacttactcctcagtgatattccaagcagcaccgcctcgctctgctccaggaagacgggcgtggagaacgtgatggcaaaggagatctgccagaagtacctggagaagggcgcagggaggcttccggaggactgcgccgaggccctggccacggctgcctgcctgtgcctgcggaggcgtaacaccagcctgcaggaggtgtgtggctctgtggctgctgtggaagagcggctccgaggtcgggagacgttgctcccttggagtgggctttctgagggtacaggctcttcttccaacaccccagaggaaacagacgacgttgacaattccagccttgatgcctcctcctccatgagtgtggcaccctgggcaggggctgccaccccacttctccccacagagaatggggaaggaaggctgcgggtcatcgtgggaagggaggctgactcctcctctgaggcctgtgttggcctggagcctccccaggatgttacagaaacttcgtggcaaattgagatcaatgaggccaaaaggaaactgatggagaatattctgctctacaaagaggaaaaagtggacagcattgagctctttggcccctgatgaccggaacacagctgaggacccttgtcctcagttggaaagatgagcatcagatcaagaaaaaggtctgaggcagaatccaagatctgccaggaaacacacaacaaaacatctgctgtcctgggtgggagggaaacttcatttcactggaatgagttgggagagaaaggccctcagcttttagagacacaaaaatccatgaagtctcttcctttctgggctttgttagtcagagcaggggatcagaggagactgaagcagaaaccctgcacacgggcccaggatgtggctgattttgtggttccggggagtatgtgatgataatcacccccagcagattccattacctcagcagctcttgttcccccgccactggcagttctgcaatgccatagcattttccagagctaagatctctgggttgtatttgctgacagcctgcaagcttgcatgctctgaaagattttttttagtttttaatttttttgtagagatggggtctcgctttgttggcgcaatcctcccacctcagactcccaaagtgctggaattacagttgggagccactgtgcctggcctggaagactttcaacttgtgtctcagtgcagttcttgactcacctctctgggcctcaggttctacaaatgccagacacctagcgaagagctctgcaggctttccactgcctgtattggaaatcttgcaattcacataattattcagtcactgcctggtacctttatcttcccatcccactaatgttagtgttttttaatggagcttttattctgagaatatgtgtttgtctgtttgtttgttttttgagacagagtctcactttgtcacccaggctggagtgcagtggcacgatctcagctcactgcaagctctgcctctcaggttcaagtgattctcctgcctcagcctcctgagtagatgggactgtaggcacctgccactatgcctggctaatttttgtgtttttagtagagacagggtttcaccatattggccaggctggtctcgaactactgacctcgtgatctgcccgccttggcctatcaaagtgttgggattacaggcttgagccaccgcacccggccgagaatatgtgttgttatttatgactggattatgaagaatcaggagaatgcatttcatgtctgattctgctgctaattaagtcaatcatttaatttttgggacctcagtttctttgtaagtaaaataacacctgcttgttcttcatccctgggctgttgggaggaacagatgagacagtggctatagaagcacttggaaaatgcacttgtcctgttttgtaaaataaaaaggtattaaatgtgtatttctgccatgtacctaatgattattcagtgcgtatatatctgaaaagtcatgttgcaaatctttctgtgaaacagatgctattttaaattcactgggagaaatatcctatttaaagtaatctatagtaatttctttttatataataaaaatatatttgtaaagtcga

SEQ ID NO: 68 - DNA, 1234 bp, Homo sapiens
agacgttcgcacacctgggtgccagcgccccagaggtcccgggacagcccgaggcgccgcgcccgccgccccgagctccccaagccttcgagagcggcgcacactcccggtctccactcgctcttccaacacccgctcgttttggcggcagctcgtgtcccagagaccgagttgccccagagaccgagacgccgccgctgcgaaggaccaatgagagccccgctgctaccgccggcgccggtggtgctgtcgctcttgatactcggctcaggccattatgctgctggattggacctcaatgacacctactctgggaagcgtgaaccattttctggggaccacagtgctgatggatttgaggttacctcaagaagtgagatgtcttcagggagtgagatttcccctgtgagtgaaatgccttctagtagtgaaccgtcctcgggagccgactatgactactcagaagagtatgataacgaaccacaaatacctggctatattgtcgatgattcagtcagagttgaacaggtagttaagcccccccaaaacaagacggaaagtgaaaatacttcagataaacccaaaagaaagaaaaagggaggcaaaaatggaaaaaatagaagaaacagaaagaagaaaaatccatgtaatgcagaatttcaaaatttctgcattcacggagaatgcaaatatatagagcacctggaagcagtaacatgcaaatgtcagcaagaatatttcggtgaacggtgtggggaaaagtccatgaaaactcacagcatgattgacagtagtttatcaaaaattgcattagcagccatagctgcctttatgtctgctgtgatcctcacagctgttgctgttattacagtccagcttagaagacaatacgtcaggaaatatgaaggagaagctgaggaacgaaagaaacttcgacaagagaatggaaatgtacatgctatagcataactgaagataaaattacaggatatcacattggagtcactgccaagtcatagccataaatgatgagtcggtcctctttccagtggatcataagacaatggaccctttttgttatgatggttttaaactttcaattgtcactttttatgctatttctgtatataaaggtgcacgaaggtaaaaagtattttttcaagttgtaaataatttatttaatatttaatggaagtgtatttattttacagctcattaaacttttttaaccaaa

SEQ ID NO: 69 - DNA, 2476 bp, Homo sapiens
gggaagggaatgtgaccaggtctaggtctggagtttcagcttggacactgagccaagcagacaagcaaagcaagccaggacacaccatcctgccccaggcccagcttctctcctgccttccaacgccatggggagcaatctcagcccccaactctgcctgatgccctttatcttgggcctcttgtctggaggtgtgaccaccactccatggtctttggcccggccccagggatcctgctctctggagggggtagagatcaaaggcggctccttccgacttctccaagagggccaggcactggagtacgtgtgtccttctggcttctacccgtaccctgtgcagacacgtacctgcagatctacggggtcctggagcaccctgaagactcaagaccaaaagactgtcaggaaggcagagtgcagagcaatccactgtccaagaccacacgacttcgagaacggggaatactggccccggtctccctactacaatgtgagtgatgagatctctttccactgctatgacggttacactctccggggctctgccaatcgcacctgccaagtgaatggccgatggagtgggcagacagcgatctgtgacaacggagcggggtactgctccaacccgggcatccccattggcacaaggaaggtgggcagccagtaccgccttgaagacagcgtcacctaccactgcagccgggggcttaccctgcgtggctcccagcggcgaacgtgtcaggaaggtggctcttggagcgggacggagccttcctgccaagactccttcatgtacgacacccctcaagaggtggccgaagctttcctgtcttccctgacagagaccatagaaggagtcgatgctgaggatgggcacggcccaggggaacaacagaagcggaagatcgtcctggacccttcaggctccatgaacatctacctggtgctagatggatcagacagcattggggccagcaacttcacaggagccaaaaagtgtctagtcaacttaattgagaaggtggcaagttatggtgtgaagccaagatatggtctagtgacatatgccacataccccaaaatttgggtcaaagtgtctgaagcagacagcagtaatgcagactgggtcacgaagcagctcaatgaaatcaattatgaagaccacaagttgaagtcagggactaacaccaagaaggccctccaggcagtgtacagcatgatgagctggccagatgacgtccctcctgaaggctggaaccgcacccgccatgtcatcatcctcatgactgatggattgcacaacatgggcggggacccaattactgtcattgatgagatccgggacttgctatacattggcaaggatcgcaaaaacccaagggaggattatctggatgtctatgtgtttggggtcgggcctttggtgaaccaagtgaacatcaatgctttggcttccaagaaagacaatgagcaacatgtgttcaaagtcaaggatatggaaaacctggaagatgttttctaccaaatgatcgatgaaagccagtctctgagtctctgtggcatggtttgggaacacaggaagggtaccgattaccacaagcaaccatggcaggccaagatctcagtcattcgcccttcaaagggacacgagagctgtatgggggctgtggtgtctgagtactttgtgctgacagcagcacattgtttcactgtggatgacaaggaacactcaatcaaggtcagcgtaggaggggagaagcgggacctggagatagaagtagtcctatttcaccccaactacaacattaatgggaaaaaagaagcaggaattcctgaattttatgactatgacgttgccctgatcaagctcaagaataagctgaaatatggccagactatcaggcccatttgtctcccctgcaccgagggaacaactcgagctttgaggcttcctccaactaccacttgccagcaacaaaaggaagagctgctccctgcacaggatatcaaagctctgtttgtgtctgaggaggagaaaaagctgactcggaaggaggtctacatcaagaatggggataagaaaggcagctgtgagagagatgctcaatatgccccaggctatgacaaagtcaaggacatctcagaggtggtcacccctcggttcctttgtactggaggagtgagtccctatgctgaccccaatacttgcagaggtgattctggcggccccttgatagttcacaagagaagtcgtttcattcaagttggtgtaatcagctggggagtagtggatgtctgcaaaaaccagaagcggcaaaagcaggtacctgctcacgcccgagactttcacatcaacctctttcaagtgctgccctggctgaaggagaaactccaagatgaggatttgggttttctataaggggtttcctgctggacaggggcgtgggattgaattaaaacagctgcgacaaca

SEQ ID NO: 70 - DNA, 3784 bp, Homo sapiens
agaaagcccacgttggccgctgcggggagcgcggcgtggagaggcgggagaccgaattccggcgccgccgccgcggccgctgctcggtgcactagcccccttccttcccatcctttctgcgagcgggtttgctgggcagccgggcgaccgccgaacggaaagcaagatcctcgccgcctccgcttgaggaggcgtgcggcgcgcggagattttgagtgggagcgacggtgcccgagagctcaggggcgcggagttcgtgagcgagaaggaagttaaacctcgcggaatagactggcatttcgggacgccttgtcgccgcagcctgggccctgcaacggggtaaacttcatggtggccctgcgatctggggaggggcgtgcgccacggtgatgccgggcatctcccgcagctcgtgagcggccccgctccccgctgccccgggtcccactcagtcgccagggagagcgcggggcagcgcacgtgtgcggccagcgaggcccagagtgaccgcgccgcgactcgcaggagccagggcgcaggctgcagtgcagcccggactcagacgcacctggcctggaccgcgcgcctctagagacctgcgcgaggctgtgaggctccccttcctcccctccaagcggttctcctggtgatcgccccttcgccacctctctagcctgggcaactgggggcgccccggacgaccatgagagataaggactgagggccaggaaggggaagcgagcccgccgagaggtggcggggactgctcacgccaagggccacagcggccgcgctccggcctcgctccgccgctccacgcctcgcgggatccgcgggggcagcccggccgggcggggatgccggggctggggcggagggcgcagtggctgtgctggtggtgggggctgctgtgcagctgctgcgggcccccgccgctgcggccgcccttgcccgctgccgcggccgccgccgccggggggcagctgctgggggacggcgggagccccggccgcacggagcagccgccgccgtcgccgcagtcctcctcgggcttcctgtaccggcggctcaagacgcaggagaagcgggagatgcagaaggagatcttgtcggtgctggggctcccgcaccggccccggcccctgcacggcctccaacagccgcagcccccggcgctccggcagcaggaggagcagcagcagcagcagcagctgcctcgcggagagccccctcccgggcgactgaagtccgcgcccctcttcatgctggatctgtacaacgccctgtccgccgacaacgacgaggacggggcgtcggagggggagaggcagcagtcctggccccacgaagcagccagctcgtcccagcgtcggcagccgcccccgggcgccgcgcacccgctcaaccgcaagagccttctggcccccggatctggcagcggcggcgcgtccccactgaccagcgcgcaggacagcgccttcctcaacgacgcggacatggtcatgagctttgtgaacctggtggagtacgacaaggagttctcccctcgtcagcgacaccacaaagagttcaagttcaacttatcccagattcctgagggtgaggtggtgacggctgcagaattccgcatctacaaggactgtgttatggggagttttaaaaaccaaacttttcttatcagcatttatcaagtcttacaggagcatcagcacagagactctgacctgtttttgttggacacccgtgtagtatgggcctcagaagaaggctggctggaatttgacatcacggccactagcaatctgtgggttgtgactccacagcataacatggggcttcagctgagcgtggtgacaagggatggagtccacgtccacccccgagccgcaggcctggtgggcagagacggcccttacgacaagcagcccttcatggtggctttcttcaaagtgagtgaggtgcacgtgcgcaccaccaggtcagcctccagccggcgccgacaacagagtcgtaatcgctctacccagtcccaggacgtggcgcgggtctccagtgcttcagattacaacagcagtgaattgaaaacagcctgcaggaagcatgagctgtatgtgagtttccaagacctgggatggcaggactggatcattgcacccaagggctatgctgccaattactgtgatggagaatgctccttcccactcaacgcacacatgaatgcaaccaaccacgcgattgtgcagaccttggttcaccttatgaaccccgagtatgtccccaaaccgtgctgtgcgccaactaagctaaatgccatctcggttctttactttgatgacaactccaatgtcattctgaaaaaatacaggaatatggttgtaagagcttgtggatgccactaactcgaaaccagatgctggggacacacattctgccttggattcctagattacatctgccttaaaaaaacacggaagcacagttggaggtgggacgatgagactttgaaactatctcatgccagtgccttattacccaggaagattttaaaggacctcattaataatttgctcacttggtaaatgacgtgagtagttgttggtctgtagcaagctgagtttggatgtctgtagcataaggtctggtaactgcagaaacataaccgtgaagctcttcctaccctcctcccccaaaaacccaccaaaattagttttagctgtagatcaagctatttggggtgtttgttagtaaatagggaaaataatctcaaaggagttaaatgtattcttggctaaaggatcagctggttcagtactgtctatcaaaggtagattttacagagaacagaaatcggggaagtggggggaacgcctctgttcagttcattcccagaagtccacaggacgcacagcccaggccacagccagggctccacggggcgcccttgtctcagtcattgctgttgtatgttcgtgctggagttttgttggtgtgaaaatacacttatttcagccaaaacataccatttctacacctcaatcctccatttgctgtactctttgctagtaccaaaagtagactgattacactgaggtgaggctacaaggggtgtgtaaccgtgtaacacgtgaaggcaatgctcacctcttctttaccagaacggttctttgaccagcacattaacttctggactgccggctctagtaccttttcagtaaagtggttctctgcctttttactatacagcataccacgccacagggttagaaccaacgaagaaaataaaatgagggtgcccagcttataagaatggtgttagggggatgagcatgctgtttatgaacggaaatcatgatttcccttgtagaaagtgaggctcagattaaattttagaatattttctaaatgtctttttcacaatcatgtactgggaaggcaatttcatactaaactgattaaataatacatttataatctacaactgtttgcacttacagctttttttgtaaatataaactataatttattgtctattttatatctgttttgctgtaacattgaaggaaagaccagacttttaaaaaaaaagagtttatttagaaagtatcatagtgtaaacaaacaaattgtaccactttgattttcttggaatacaagactcgtgatgcaaagctgaagttgtgtgtacaagactcttgacagttgtgcttctctaggaggttgggtttttttaaaaaaagaattatctgtgaaccatacgtgattaataaagatttcctttaaggca

SEQ ID NO: 71 - DNA, 2488 bp, Homo sapiens
acacagtgcacgaagacgctgtcgggagagcccaggattcaacacgggccttgagaaatgtggctcttgtacctcctggtgccggccctgttctgcagggcaggaggctccattcccatccctcagaagttatttggggaggtgacttcccctctgttccccaagccttaccccaacaactttgaaacaaccactgtgatcacagtccccacgggatacagggtgaagctcgtcttccagcagtttgacctggagccttctgaaggctgcttctatgattatgtcaagatctctgctgataagaaaagcctggggaggttctgtgggcaactgggttctccactgggcaaccccccgggaaagaaggaatttatgtcccaagggaacaagatgctgctgaccttccacacagacttctccaacgaggagaatgggaccatcatgttctacaagggcttcctggcctactaccaagctgtggaccttgatgaatgtgcttcccggagcaaatcaggggaggaggatccccagccccagtgccagcacctgtgtcacaactacgttggaggctacttctgttcctgccgtccaggctatgagcttcaggaagacaggcattcctgccaggctgagtgcagcagcgagctgtacacggaggcatcaggctacatctccagcctggagtaccctcggtcctacccccctgacctgcgctgcaactacagcatccgggtggagcggggcctcaccctgcacctcaagttcctggagccttttgatattgatgaccaccagcaagtacactgcccctatgaccagctacagatctatgccaacgggaagaacattggcgagttctgtgggaagcaaaggccccccgacctcgacaccagcagcaatgctgtggatctgctgttcttcacagatgagtcgggggacagccggggctggaagctgcgctacaccaccgagatcatcaagtgcccccagcccaagaccctagacgagttcaccatcatccagaacctgcagcctcagtaccagttccgtgactacttcattgctacctgcaagcaaggctaccagctcatagaggggaaccaggtgctgcattccttcacagctgtctgccaggatgatggcacgtggcatcgtgccatgcccagatgcaagatcaaggactgtgggcagccccgaaacctgcctaatggtgacttccgttacaccaccacaatgggagtgaacacctacaaggcccgtatccagtactactgccatgagccatattacaagatgcagaccagagctggcagcagggagtctgagcaaggggtgtacacctgcacagcacagggcatttggaagaatgaacagaagggagagaagattcctcggtgcttgccagtgtgtgggaagcccgtgaaccccgtggaacagaggcagcgcatcatcggagggcaaaaagccaagatgggcaacttcccctggcaggtgttcaccaacatccacgggcgcgggggcggggccctgctgggcgaccgctggatcctcacagctgcccacaccctgtatcccaaggaacacgaagcgcaaagcaacgcctctttggatgtgttcctgggccacacaaatgtggaagagctcatgaagctaggaaatcaccccatccgcagggtcagcgtccacccggactaccgtcaggatgagtcctacaattttgagggggacatcgccctgctggagctggaaaatagtgtcaccctgggtcccaacctcctccccatctgcctccctgacaacgataccttctacgacctgggcttgatgggctatgtcagtggcttcggggtcatggaggagaagattgctcatgacctcaggtttgtccgtctgcccgtagctaatccacaggcctgtgagaactggctccggggaaagaataggatggatgtgttctctcaaaacatgttctgtgctggacacccatctctaaagcaggacgcctgccagggggatagtgggggcgtttttgcagtaagggacccgaacactgatcgctgggtggccacgggcatcgtgtcctggggcatcgggtgcagcaggggctatggcttctacaccaaagtgctcaactacgtggactggatcaagaaagagatggaggaggaggactgagcccagaattcactaggttcgaatccagagagcagtgtggaaaaaaaaaaacaaaaaacaactgaccagttgttgataaccactaagagtctctattaaaattactgatgcagaaagaccgtgtgtgaaattctctttcctgtagtcccattgatgtactttacctgaaacaacccaaagggcccctttctttcttctgaggattgcagaggatatagttatcaatctctagttgtcactttcctcttccactttgataccattgggtcattgaatataactttttccaaataaagttttatgagaaatgcca

SEQ ID NO: 72 - DNA, 809 bp, Homo sapiens
cccgctgctctgctgcctgcccggggtaccaacatggcccagaagcgtcctgcctgcaccctgaagcctgagtgtgtccagcagctgctggtttgctcccaggaggccaagaagtcagcctactgcccctacagtcactttcctgtgggggctgccctgctcacccaggaggggagaatcttcaaagggtgcaacatagaaaatgcctgctacccgctgggcatctgtgctgaacggaccgctatccagaaggccgtctcagaagggtacaaggatttcagggcaattgctatcgccagtgacatgcaagatgattttatctctccatgtggggcctgcaggcaagtcatgagagagtttggcaccaactggcccgtgtacatgaccaagccggatggtacgtatattgtcatgacggtccaggagctgctgccctcctcctttgggcctgaggacctgcagaagacccagtgacagccagagaatgcccactgcctgtaacagccacctggagaacttcataaagatgtctcacagccctggggacacctgcccagtgggccccagccctacagggactgggcaaagatgatgtttccagattacactccagcctgagtcagcacccctcctagcaacctgccttgggacttagaacaccgccgccccctgccccacctttcctttccttcctgtgggccctctttcaaagtccagcctagtctggactgcttccccatcagccttcccaaggttctatcctgttccgagcaacttttctaattataaacatcacagaacatcctgga

SEQ ID NO: 73 - DNA, 2462 bp, Homo sapiens
acaccgcggggaccaggaggcacgctggttttccggggccgctccatcgcgccttcctcctgcgcctcgcttctccggtccagccgccatcttcctttccgcacaggggccgccgagcggggccatgcagccaacgctgcttctcagcctcctgggagccgtggggctggcggctgtcaattccatgccagtggataacaggaaccacaatgaaggaatggtgactcgctgcatcattgaggtcctctcaaatgccttgtcgaagtccagcgctccacccatcacccctgagtgccgccaagtcctgaagacgagtagaaaagacgtcaaagacaaagagacaactgaaaatgaaaacacaaagtttgaagtaagattgttaagagacccagctgatgcctcggaagcccacgagtcctccagcaggggagaggcaggagccccaggggaggaggacatccaaggcccaacaaaggcagacacagagaaatgggcagagggaggcgggcacagccgagagcgagcggatgagccccagtggagcctctatccctccgacagccaagtctctgaagaagtgaagacacgccattctgagaagagccagagagaggatgaggaggaggaggagggagagaactatcaaaaaggggagcgaggggaagatagcagtgaagagaaacaccttgaagagccaggagagacacaaaacgcttttctcaatgaaagaaagcaggcttcagctataaaaaaagaggagttagtggccagatcggaaacacatgctgccgggcattctcaggagaagacacatagccgagagaagagtagccaggagagtggagaggagacagggagccaggagaatcacccccaggagtctaaaggccaaccccgaagccaggaagaatctgaggaaggtgaggaagatgccacctctgaggtggacaaacgacgcacgaggcccagacaccaccacgggaggagcaggcccgacaggtcctctcaaggagggagtcttccctctgaggaaaagggacacccccaggaggaatctgaggagtcaaacgtcagcatggccagtttaggggaaaagagggaccaccattcaacccactacagggcttcagaggaagaacctgaatatggagaagaaataaagggttatccaggcgtccaggcccctgaggacctggagtgggagcgctataggggcagaggaagtgaagaatacagggctccaagacctcagagtgaggagagttgggatgaggaggacaagagaaactaccccagcttagagcttgataagatggcacatggatatggtgaagaaagtgaggaagagaggggccttgagccgggaaagggacgccatcacagaggcaggggaggggagccacgtgcctatttcatgtctgacaccagagaagagaaaaggttcttgggtgaaggacaccaccgtgtccaagaaaaccagatggacaaggcaaggaggcatccacaaggtgcgtggaaagagctggacagaaattatctcaactacggtgaggaaggagccccagggaagtggcagcagcagggagacctgcaggacactaaagaaaacagggaggaagctaggtttcaagataaacaatatagctcccatcacacagctgaaaagaggaagagattaggggaactgttcaacccatactacgaccctctccagtggaagagcagccattttgaaagaagagacaacatgaatgacaattttctcgagggtgaggaggaaaatgagctgaccttgaacgagaagaatttcttcccagaatacaactatgactggtgggagaaaaagcccttctctgaggatgtgaactgggggtatgagaagagaaacctcgccagggtccccaagctggacctgaaaaggcaatatgacagggtggcccaactggaccagctccttcactacaggaagaagtcagctgagtttccagacttctatgattctgaggagccggtgagcacccaccaggaggcagaaaatgaaaaggacagggctgaccagacagtcctgacagaggacgagaaaaaagaactcgaaaacttggctgcaatggatttggaactacagaagatagctgagaaattcagccaaaggggctgactgtcattggagcggtgggcactgttaagaagcagccatcacatgatctgtttttcaccacttcactgaaagacaccatttatctacccaagggcagaaagtagaacttactattcattaaatgtttgacacaattggaattgtctttaatttctgtcagaatgctattgaaaatgtgaattgcatgacttgtagcatattcttttctgcaaaatagacatattaacatgcttatgacaatgactgtgctactgtctttggaaaaatgtttgtctcagttggaaataataaaagattcacctga

SEQ ID NO: 74 - DNA, 974 bp, Homo sapiens
agctttggggttgtccctggacttgtcttggttccagaacctgacgacccggcgacggcgacgtctcttttgactaaaagacagtgtccagtgctccagcctaggagtctacggggaccgcctcccgcgccgccaccatgcccaacttctctggcaactggaaaatcatccgatcggaaaacttcgaggaattgctcaaagtgctgggggtgaatgtgatgctgaggaagattgctgtggctgcagcgtccaagccagcagtggagatcaaacaggagggagacactttctacatcaaaacctccaccaccgtgcgcaccacagagattaacttcaaggttggggaggagtttgaggagcagactgtggatgggaggccctgtaagagcctggtgaaatgggagagtgagaataaaatggtctgtgagcagaagctcctgaagggagagggccccaagacctcgtggaccagagaactgaccaacgatggggaactgatcctgaccatgacggcggatgacgttgtgtgcaccagggtctacgtccgagagtgagtggccacaggtagaaccgcggccgaagcccaccactggccatgctcaccgccctgcttcactgccccctccgtcccaccccctccttctaggatagcgctccccttaccccagtcacttctgggggtcactgggatgcctcttgcagggtcttgctttctttgacctcttctctcctcccctacaccaacaaagaggaatggctgcaagagcccagatcacccattccgggttcactccccgcctccccaagtcagcagtcctagccccaaaccagcccagagcagggtctctctaaaggggacttgagggcctgagcaggaaagactggccctctagcttctaccctttgtccctgtagcctatacagtttagaatatttatttgttaattttattaaaatgctttaaaaaaataaaa

SEQ ID NO: 75 - DNA, 2358 bp, Homo sapiens
attcggccgaaggagctacgcgggccacgctgctggctggcctgacctaggcgcgcggggtcgggcggccgcgcgggcgggctgagtgagcaagacaagacactcaagaagagcgagctgcgcctgggtcccggccaggcttgcacgcagaggcgggcggcagacggtgcccggcggaatctcctgagctccgccgcccagctctggtgccagcgcccagtggccgccgcttcgaaagtgactggtgcctcgccgcctcctctcggtgcgggaccatgaagctgctgccgtcggtggtgctgaagctctttctggctgcagttctctcggcactggtgactggcgagagcctggagcggcttcggagagggctagctgctggaaccagcaacccggaccctcccactgtatccacggaccagctgctacccctaggaggcggccgggaccggaaagtccgtgacttgcaagaggcagatctggaccttttgagagtcactttatcctccaagccacaagcactggccacaccaaacaaggaggagcacgggaaaagaaagaagaaaggcaaggggctagggaagaagagggacccatgtcttcggaaatacaaggacttctgcatccatggagaatgcaaatatgtgaaggagctccgggctccctcctgcatctgccacccgggttaccatggagagaggtgtcatgggctgagcctcccagtggaaaatcgcttatatacctatgaccacacaaccatcctggccgtggtggctgtggtgctgtcatctgtctgtctgctggtcatcgtggggcttctcatgtttaggtaccataggagaggaggttatgatgtggaaaatgaagagaaagtgaagttgggcatgactaattcccactgagagagacttgtgctcaaggaatcggctggggactgctacctctgagaagacacaaggtgatttcagactgcagaggggaaagacttccatctagtcacaaagactccttcgtccccagttgccgtctaggattgggcctcccataattgctttgccaaaataccagagccttcaagtgccaaacagagtatgtccgatggtatctgggtaagaagaaagcaaaagcaagggaccttcatgcccttctgattcccctccaccaaaccccacttcccctcataagtttgtttaaacacttatcttctggattagaatgccggttaaattccatatgctccaggatctttgactgaaaaaaaaaaagaagaagaagaaggagagcaagaaggaaagatttgtgaactggaagaaagcaacaaagattgagaagccatgtactcaagtaccaccaagggatctgccattgggaccctccagtgctggatttgatgagttaactgtgaaataccacaagcctgagaactgaattttgggacttctacccagatggaaaaataacaactatttttgttgttgttgtttgtaaatgcctcttaaattatatatttattttattctatgtatgttaatttatttagtttttaacaatctaacaataatatttcaagtgcctagactgttactttggcaatttcctggccctccactcctcatccccacaatctggcttagtgccacccacctttgccacaaagctaggatggttctgtgacccatctgtagtaatttattgtctgtctacatttctgcagatcttccgtggtcagagtgccactgcgggagctctgtatggtcaggatgtaggggttaacttggtcagagccactctatgagttggacttcagtcttgcctaggcgattttgtctaccatttgtgttttgaaagcccaaggtgctgatgtcaaagtgtaacagatatcagtgtctccccgtgtcctctccctgccaagtctcagaagaggttgggcttccatgcctgtagctttcctggtccctcacccccatggccccaggcccacagcgtgggaactcactttcccttgtgtcaagacatttctctaactcctgccattcttctggtgctactccatgcaggggtcagtgcagcagaggacagtctggagaaggtattagcaaagcaaaaggctgagaaggaacagggaacattggagctgactgttcttggtaactgattacctgccaattgctaccgagaaggttggaggtggggaaggctttgtataatcccacccacctcaccaaaacgatgaagttatgctgtcatggtcctttctggaagtttctggtgccatttctgaactgttacaacttgtatttccaaacctggttcatatttatactttgcaatccaaataaagataacccttattccata

SEQ ID NO: 76 - DNA, 3137 bp, Homo sapiens
gagagatcccagcgcgcagaacttggggagccgccgccgccatccgccgccgcagccagcttccgccgccgcaggaccggcccctgccccagcctccgcagccgcggcgcgtccacgcccgcccgcgcccagggcgagtcggggtcgccgcctgcacgcttctcagtgttccccgcgccccgcatgtaacccggccaggcccccgcaactgtgtcccctgcagctccagccccgggctgcacccccccgccccgacaccagctctccagcctgctcgtccaggatggccgcggccaaggccgagatgcagctgatgtccccgctgcagatctctgacccgttcggatcctttcctcactcgcccaccatggacaactaccctaagctggaggagatgatgctgctgagcaacggggctccccagttcctcggcgccgccggggccccagagggcagcggcagcaacagcagcagcagcagcagcgggggcggtggaggcggcgggggcggcagcaacagcagcagcagcagcagcaccttcaaccctcaggcggacacgggcgagcagccctacgagcacctgaccgcagagtcttttcctgacatctctctgaacaacgagaaggtgctggtggagaccagttaccccagccaaaccactcgactgccccccatcacctatactggccgcttttccctggagcctgcacccaacagtggcaacaccttgtggcccgagcccctcttcagcttggtcagtggcctagtgagcatgaccaacccaccggcctcctcgtcctcagcaccatctccagcggcctcctccgcctccgcctcccagagcccacccctgagctgcgcagtgccatccaacgacagcagtcccatttactcagcggcacccaccttccccacgccgaacactgacattttccctgagccacaaagccaggccttcccgggctcggcagggacagcgctccagtacccgcctcctgcctaccctgccgccaagggtggcttccaggttcccatgatccccgactacctgtttccacagcagcagggggatctgggcctgggcaccccagaccagaagcccttccagggcctggagagccgcacccagcagccttcgctaacccctctgtctactattaaggcctttgccactcagtcgggctcccaggacctgaaggccctcaataccagctaccagtcccagctcatcaaacccagccgcatgcgcaagtaccccaaccggcccagcaagacgcccccccacgaacgcccttacgcttgcccagtggagtcctgtgatcgccgcttctcccgctccgacgagctcacccgccacatccgcatccacacaggccagaagcccttccagtgccgcatctgcatgcgcaacttcagccgcagcgaccacctcaccacccacatccgcacccacacaggcgaaaagcccttcgcctgcgacatctgtggaagaaagtttgccaggagcgatgaacgcaagaggcataccaagatccacttgcggcagaaggacaagaaagcagacaaaagtgttgtggcctcttcggccacctcctctctctcttcctacccgtccccggttgctacctcttacccgtccccggttactacctcttatccatccccggccaccacctcatacccatcccctgtgcccacctccttctcctctcccggctcctcgacctacccatcccctgtgcacagtggcttcccctccccgtcggtggccaccacgtactcctctgttccccctgctttcccggcccaggtcagcagcttcccttcctcagctgtcaccaactccttcagcgcctccacagggctttcggacatgacagcaaccttttctcccaggacaattgaaatttgctaaagggaaaggggaaagaaagggaaaagggagaaaaagaaacacaagagacttaaaggacaggaggaggagatggccataggagaggagggttcctcttaggtcagatggaggttctcagagccaagtcctccctctctactggagtggaaggtctattggccaacaatcctttctgcccacttccccttccccaattactattccctttgacttcagctgcctgaaacagccatgtccaagttcttcacctctatccaaagaacttgatttgcatggattttggataaatcatttcagtatcatctccatcatatgcctgaccccttgctcccttcaatgctagaaaatcgagttggcaaaatggggtttgggcccctcagagccctgccctgcacccttgtacagtgtctgtgccatggatttcgtttttcttggggtactcttgatgtgaagataatttgcatattctattgtattatttggagttaggtcctcacttgggggaaaaaaaaaaaagaaaagccaagcaaaccaatggtgatcctctattttgtgatgatgctgtgacaataagtttgaacctttttttttgaaacagcagtcccagtattctcagagcatgtgtcagagtgttgttccgttaacctttttgtaaatactgcttgaccgtactctcacatgtggcaaaatatggtttggtttttctttttttttttttttgaaagtgttttttcttcgtccttttggtttaaaaagtttcacgtcttggtgccttttgtgtgatgcgccttgctgatggcttgacatgtgcaattgtgagggacatgctcacctctagccttaaggggggcagggagtgatgatttgggggaggctttgggagcaaaataaggaagagggctgagctgagcttcggttctccagaatgtaagaaaacaaaatctaaaacaaaatctgaactctcaaaagtctatttttttaactgaaaatgtaaatttataaatatattcaggagttggaatgttgtagttacctactgagtaggcggcgatttttgtatgttatgaacatgcagttcattattttgtggttctattttactttgtacttgtgtttgcttaaacaaagtgactgtttggcttataaacacattgaatgcgctttattgcccatgggatatgtggtgtatatccttccaaaaaattaaaacgaaaataaagta

SEQ ID NO: 77 - DNA, 6781 bp, Homo sapiens
cggccccagaaaacccgagcgagtagggggcggcgcgcaggagggaggagaactgggggcgcgggaggctggtgggtgtggggggtggagatgtagaagatgtgacgccgcggcccggcgggtgccagattagcggacgcggtgcccgcggttgcaacgggatcccgggcgctgcagcttgggaggcggctctccccaggcggcgtccgcggagacacccatccgtgaaccccaggtcccgggccgccggctcgccgcgcaccaggggccggcggacagaagagcggccgagcggctcgaggctgggggaccgcgggcgcggccgcgcgctgccgggcgggaggctggggggccggggccggggccgtgccccggagcgggtcggaggccggggccggggccgggggacggcggctccccgcgcggctccagcggctcggggatcccggccgggccccgcagggaccatggcagccgggagcatcaccacgctgcccgccttgcccgaggatggcggcagcggcgccttcccgcccggccacttcaaggaccccaagcggctgtactgcaaaaacgggggcttcttcctgcgcatccaccccgacggccgagttgacggggtccgggagaagagcgaccctcacatcaagctacaacttcaagcagaagagagaggagttgtgtctatcaaaggagtgtgtgctaaccgttacctggctatgaaggaagatggaagattactggcttctaaatgtgttacggatgagtgtttcttttttgaacgattggaatctaataactacaatacttaccggtcaaggaaatacaccagttggtatgtggcactgaaacgaactgggcagtataaacttggatccaaaacaggacctgggcagaaagctatactttttcttccaatgtctgctaagagctgattttaatggccacatctaatctcatttcacatgaaagaagaagtatattttagaaatttgttaatgagagtaaaagaaaataaatgtgtatagctcagtttggataattggtcaaacaattttttatccagtagtaaaatatgtaaccattgtcccagtaaagaaaaataacaaaagttgtaaaatgtatattctcccttttatattgcatctgctgttacccagtgaagcttacctagagcaatgatctttttcacgcatttgctttattcgaaaagaggcttttaaaatgtgcatgtttagaaacaaaatttcttcatggaaatcatatacattagaaaatcacagtcagatgtttaatcaatccaaaatgtccactatttcttatgtcattcgttagtctacatgtttctaaacatataaatgtgaatttaatcaattcctttcatagttttataattctctggcagttccttatgatagagtttataaaacagtcctgtgtaaactgctggaagttcttccacagtcaggtcaattttgtcaaacccttctctgtacccatacagcagcagcctagcaactctgctggtgatgggagttgtattttcagtcttcgccaggtcattgagatccatccactcacatcttaagcattcttcctggcaaaaatttatggtgaatgaatatggctttaggcggcagatgatatacatatctgacttcccaaaagctccaggatttgtgtgctgttgccgaatactcaggacggacctgaattctgattttataccagtctcttcaaaaacttctcgaaccgctgtgtctcctacgtaaaaaaagagatgtacaaatcaataataattacacttttagaaactgtatcatcaaagattttcagttaaagtagcattatgtaaaggctcaaaacattaccctaacaaagtaaagttttcaatacaaattctttgccttgtggatatcaagaaatcccaaaatattttcttaccactgtaaattcaagaagcttttgaaatgctgaatatttctttggctgctacttggaggcttatctacctgtacatttttggggtcagctctttttaacttcttgctgctctttttcccaaaaggtaaaaatatagattgaaaagttaaaacattttgcatggctgcagttcctttgtttcttgagataagattccaaagaacttagattcatttcttcaacaccgaaatgctggaggtgtttgatcagttttcaagaaacttggaatataaataattttataattcaacaaaggttttcacattttataaggttgatttttcaattaaatgcaaatttgtgtggcaggatttttattgccattaacatatttttgtggctgctttttctacacatccagatggtccctctaactgggctttctctaattttgtgatgttctgtcattgtctcccaaagtatttaggagaagccctttaaaaagctgccttcctctaccactttgctggaaagcttcacaattgtcacagacaaagatttttgttccaatactcgttttgcctctatttttcttgtttgtcaaatagtaaatgatatttgcccttgcagtaattctactggtgaaaaacatgcaaagaagaggaagtcacagaaacatgtctcaattcccatgtgctgtgactgtagactgtcttaccatagactgtcttacccatcccctggatatgctcttgttttttccctctaatagctatggaaagatgcatagaaagagtataatgttttaaaacataaggcatttgtctgccatttttcaattacatgctgacttcccttacaattgagatttgcccataggttaaacatggttagaaacaactgaaagcataaaagaaaaatctaggccgggtgcagtggctcatgcctatattccctgcactttgggaggccaaagcaggaggatcgcttgagcccaggagttcaagaccaacctggtgaaaccccgtctctacaaaaaaacacaaaaaatagccaggcatggtggcgtgtacatgtggtctcagatacttgggaggctgaggtgggagggttgatcacttgaggctgagaggtcaaggttgcagtgagccataatcgtgccactgcagtccagcctaggcaacagagtgagactttgtctcaaaaaaagagaaattttccttaataagaaaagtaatttttactctgatgtgcaatacatttgttattaaatttattatttaagatggtagcactagtcttaaattgtataaaatatcccctaacatgtttaaatgtccatttttattcattatgctttgaaaaataattatggggaaatacatgtttgttattaaatttattattaaagatagtagcactagtcttaaatttgatataacatctcctaacttgtttaaatgtccatttttattctttatgtttgaaaataaattatggggatcctatttagctcttagtaccactaatcaaaagttcggcatgtagctcatgatctatgctgtttctatgtcgtggaagcactggatgggggtagtgagcaaatctgccctgctcagcagtcaccatagcagctgactgaaaatcagcactgcctgagtagttttgatcagtttaacttgaatcactaactgactgaaaattgaatgggcaaataagtgcttttgtctccagagtatgcgggagacccttccacctcaagatggatatttcttccccaaggatttcaagatgaattgaaatttttaatcaagatagtgtgctttattctgttgtattttttattattttaatatactgtaagccaaactgaaataacatttgctgttttataggtttgaagaacataggaaaaactaagaggttttgtttttatttttgctgatgaagagatatgtttaaatatgttgtattgttttgtttagttacaggacaataatgaaatggagtttatatttgttatttctattttgttatatttaataatagaattagattgaaataaaatataatgggaaataatctgcagaatgtgggttttcctggtgtttccctctgactctagtgcactgatgatctctgataaggctcagctgctttatagttctctggctaatgcagcagatactcttcctgccagtggtaatacgattttttaagaaggcagtttgtcaattttaatcttgtggatacctttatactcttagggtattattttatacaaaagccttgaggattgcattctattttctatatgaccctcttgatatttaaaaaacactatggataacaattcttcatttacctagtattatgaaagaatgaaggagttcaaacaaatgtgtttcccagttaactagggtttactgtttgagccaatataaatgtttaactgtttgtgatggcagtattcctaaagtacattgcatgttttcctaaatacagagtttaaataatttcagtaattcttagatgattcagcttcatcattaagaatatcttttgttttatgttgagttagaaatgccttcatatagacatagtctttcagacctctactgtcagttttcatttctagctgctttcagggttttatgaattttcaggcaaagctttaatttacactaagcttaggaagtatggctaatgccaacggcagtttttttcttcttaattccacatgactgaggcatatatgatctctgggtaggtgagttgttgtgacaaccacaagcactttttttttttttaaagaaaaaaaggtagtgaatttttaatcatctggactttaagaaggattctggagtatacttaggcctgaaattatatatatttggcttggaaatgtgtttttcttcaattacatctacaagtaagtacagctgaaattcagaggacccataagagttcacatgaaaaaaatcaatttatttgaaaaggcaagatgcaggagagaggaagccttgcaaacctgcagactgctttttgcccaatatagattgggtaaggctgcaaaacataagcttaattagctcacatgctctgctctcacgtggcaccagtggatagtgtgagagaattaggctgtagaacaaatggccttctctttcagcattcacaccactacaaaatcatcttttatatcaacagaagaataagcataaactaagcaaaaggtcaataagtacctgaaaccaagattggctagagatatatcttaatgcaatccattttctgatggattgttacgagttggctatataatgtatgtatggtattttgatttgtgtaaaagttttaaaaatcaagctttaagtacatggacatttttaaataaaatatttaaagacaatttagaaaattgccttaatatcattgttggctaaatagaataggggacatgcatattaaggaaaaggtcatggagaaataatattggtatcaaacaaatacattgatttgtcatgatacacattgaatttgatccaatagtttaaggaataggtaggaaaatttggtttctatttttcgatttcctgtaaatcagtgacataaataattcttagcttattttatatttccttgtcttaaatactgagctcagtaagttgtgttaggggattatttctcagttgagactttcttatatgacattttactatgttttgactacctgactattaaaaataaatagtagatacaattttcataaagtgaagaattatataatcactgctttataactgactttattatatttatttcaaagttcatttaaaggctactattcatcctctgtgatggaatggtcaggaatttgttttctcatagtttaattccaacaacaatattagtcgtatccaaaataacctttaatgctaaactttactgatgtatatccaaagcttctcattttcagacagattaatccagaagcagtcataaacagaagaataggtggtatgttcctaatgatattatttctactaatggaataaactgtaatattagaaattatgctgctaattatatcagctctgaggtaatttctgaaatgttcagactcagtcggaacaaattggaaaatttaaatttttattcttagctataaagcaagaaagtaaacacattaatttcctcaacatttttaagccaattaaaaatataaaagatacacaccaatatcttcttcaggctctgacaggcctcctggaaacttccacatatttttcaactgcagtataaagtcagaaaataaagttaacataactttcactaacacacacatatgtagatttcacaaaatccacctataattggtcaaagtggttgagaatatattttttagtaattgcatgcaaaatttttctagcttccatcctttctccctcgtttcttctttttttgggggagctggtaactgatgaaatcttttcccaccttttctcttcaggaaatataagtggttttgtttggttaacgtgatacattctgtatgaatgaaacattggagggaaacatctactgaatttctgtaatttaaaatattttgctgctagttaactatgaacagatagaagaatcttacagatgctgctataaataagtagaaaatataaatttcatcactaaaatatgctattttaaaatctatttcctatattgtatttctaatcagatgtattactcttattatttctattgtatgtgttaatgattttatgtaaaaatgtaattgcttttcatgagtagtatgaataaaattgattagtttgtgttttcttgtctcccaaaaaaa

SEQ ID NO: 78 - DNA, 812 bp, Homo sapiens
gtttactcgctgctgtgcccatctatcagcaggctccgggctgaagattgcttctcttctctcctccaaggtctagtgacggagcccgcgcgcggcgccaccatgcggcagaaggcggtatcgcttttcttgtgctacctgctgctcttcacttgcagtggggtggaggcaggtaagaaaaagtgctcggagagctcggacagcggctccgggttctggaaggccctgaccttcatggccgtcggaggaggactcgcagtcgccgggctgcccgcgctgggcttcaccggcgccggcatcgcggccaactcggtggctgcctcgctgatgagctggtctgcgatcctgaatgggggcggcgtgcccgccggggggctagtggccacgctgcagagcctcggggctggtggcagcagcgtcgtcataggtaatattggtgccctgatgggctacgccacccacaagtatctcgatagtgaggaggatgaggagtagccagcagctcccagaacctcttcttccttcttggcctaactcttccagttaggatctagaactttgcctttttttttttttttttttttttgagatgggttctcactatattgtccaggctagagtgcagtggctattcacagatgcgaacatagtacactgcagcctccaactcctagcctcaagtgatcctcctgtctcaacctcccaagtaggattacaagcatgcgccgacgatgcccagaatccagaactttgtctatcactctccccaacaacctagatgtgaaaacagaataaacttcacccagaaaaca

SEQ ID NO: 79 - DNA, 2883 bp, Homo sapiens
acagaagtgctagaagccagtgctcgtgaactaaggagaaaaagaacagacaagggaacagcctggacatggcatcagagatccacatgacaggcccaatgtgcctcattgagaacactaatgggcgactgatggcgaatccagaagctctgaagatcctttctgccattacacagcctatggtggtggtggcaattgtgggcctctaccgcacaggcaaatcctacctgatgaacaagctggctggaaagaaaaagggcttctctctgggctccacggtgcagtctcacactaaaggaatctggatgtggtgtgtgccccaccccaagaagccaggccacatcctagttctgctggacaccgagggtctgggagatgtagagaagggtgacaaccagaatgactcctggatcttcgccctggccgtcctcctgagcagcaccttcgtgtacaatagcataggaaccatcaaccagcaggctatggaccaactgtactatgtgacagagctgacacatagaatccgatcaaaatcctcacctgatgagaatgagaatgaggttgaggattcagctgactttgtgagcttcttcccagactttgtgtggacactgagagatttctccctggacttggaagcagatggacaacccctcacaccagatgagtacctgacatactccctgaagctgaagaaaggtaccagtcaaaaagatgaaacttttaacctgcccagactctgtatccggaaattcttcccaaagaaaaaatgctttgtctttgatcggcccgttcaccgcaggaagcttgcccagctcgagaaactacaagatgaagagctggaccccgaatttgtgcaacaagtagcagacttctgttcctacatctttagtaattccaaaactaaaactctttcaggaggcatccaggtcaacgggcctcgtctagagagcctggtgctgacctacgtcaatgccatcagcagtggggatctgccgtgcatggagaacgcagtcctggccttggcccagatagagaactcagctgcagtgcaaaaggctattgcccactatgaacagcagatgggccagaaggtgcagctgcccacagaaaccctccaggagctgctggacctgcacagggacagtgagagagaggccattgaagtcttcatcaggagttccttcaaagatgtggaccatctatttcaaaaggagttagcggcccagctagaaaaaaagcgggatgacttttgtaaacagaatcaggaagcatcatcagatcgttgctcagctttacttcaggtcattttcagtcctctagaagaagaagtgaaggcgggaatttattcgaaaccagggggctatcgtctctttgttcagaagctacaagacctgaagaaaaagtactatgaggaaccgaggaaggggatacaggctgaagagattctgcagacatacttgaaatccaaggagtctatgactgatgcaattctccagacagaccagactctcacagaaaaagaaaaggagattgaagtggaacgtgtgaaagctgagtctgcacaggcttcagcaaaaatgttgcaggaaatgcaaagaaagaatgagcagatgatggaacagaaggagaggagttatcaggaacacttgaaacaactgactgagaagatggagaacgacagggtccagttgctgaaagagcaagagaggaccctcgctcttaaacttcaggaacaggagcaactactaaaagagggatttcaaaaagaaagcagaataatgaaaaatgagatacaggatctccagacgaaaatgagacgacgaaaggcatgtaccataagctaaagaccagagccttcctgtcacccctaaccaaggcataattgaaacaattttagaatttggaacaagcgtcactacatttgataataattagatcttgcatcataacaccaaaagtttataaaggcatgtggtacaatgatcaaaatcatgttttttcttaaaaaaaaaaaaagactgtaaattgtgcaacaaagatgcatttacctctgtatcaactcaggaaatctcataagctggtaccactcaggagaagtttattcttccagatgaccagcagtagacaaatggatactgagcagagtcttaggtaaaagtcttgggaaatatttgggcattggtctggccaagtctacaatgtcccaatatcaaggacaaccaccctagcttcttagtgaagacaatgtacagttatccgttagatcaagactacacggtctatgagcaataatgtgatttctggacattgcccatgtataatcctcactgatgatttcaagctaaagcaaaccaccttatacagagatctagaatctctttatgttctccagaggaaggtggaagaaaccatgggcaggagtaggaattgagtgataaacaattgggctaatgaagaaaacttctcttattgttcagttcatccagattataacttcaatgggacactttagaccattagacaattgacactggattaaacaaattcacataatgccaaatacacaatgtatttatagcaacgtataatttgcaaagatggactttaaaagatgctgtgtaactaaactgaaataattcaattacttattatttagaatgttaaagcttatgatagtcttttctaactcttaacactcatacttgaaaactttctgagtttccccagaagagaatatgggattttttttgacatttttgactcatttaataatgctcttgtgtttacctagtatatgtagactttgtcttatgtgtgaaaagtcctaggaaagtggttgatgtttcttatagcaattaaaaattatttttgaactgaaaa

SEQ ID NO: 80 - DNA, 1500 bp, Homo sapiens
gctcaataccccaagcaatacctgcaactgaggattcttcccggggagaccgcagcccatcggcatggctcaagagtttgtgaactgcaaaatccagcctgggaaggtggttgtgttcatcaagcccacctgcccgtactgcaggagggcccaagagatcctcagtcaattgcccatcaaacaagggcttctggaatttgtcgatatcacagccaccaaccacactaacgagattcaagattatttgcaacagctcacgggagcaagaacggtgcctcgagtctttattggtaaagattgtataggcggatgcagtgatctagtctctttgcaacagagtggggaactgctgacgcggctaaagcagattggagctctgcagtaaccacagaacaggccccatgctgacgtccctcctcaagagctggatggcattgcaaatgatgacagcacttctggtggatgaatttgggggcacaaacagcttttttcctcttttggctcagtatttaaaagtggaccaacttgctcttaatcacagggccaagaaggttgacgggccatcttggttttcttctggatgtgctctttggttttcagaagactgtgacaagttctggcccaggattcgctcactgaccctcaattgtcctctttggcatgcgtttcttactgttctccatgtgtcggcatgtctctacctctaagccagtgtttttcaactatgtttatccagactccttctccacaatgatgaatccacagttggttatctgctactgcccattagctaaaatcattttgctgcttgactttatggagtttgtattatgaaatcagtgggtattttgaatgtgttctttctaactacatgcatctctccactcaactccaccccatcccatcccaccttgaaaatcactgctctgaaccagtgttctccaccttgtcctccacagatctcataggaaatgttcaacaattctgtgaaaggtcacaggacccaattggagaaatcatatgaaaagcatagttggtcttggtgtcatatggatcagaggcacaagtgcagaggctgtggtcatgcggaacactctgttatttaagatggctatccagataatcctgaacactgtgtatttattttatttagactaccagcaaagattaaagcatgaaatgtaaaacatctgataaaacttacagccccctacaccaagagtgtatctgtgaaagagctcctacactttgaaaacttaagaatcccttatcatgaagtttgcctgttctagaattgtaagattgttaatttccttcaatctctagtgacaacacttaatttcttttctaataaaaaaaacctatagatgattcagtgatttttgtccaattcatttgcatgttctcaagacattaaggaatgttatgcgaaatacactaacttaaaactgtgtttatatttggccctgccattataaataaagacacgtgctgctgtca

SEQ ID NO: 81 - DNA, 1115 bp, Homo sapiens
acagagcccgggccacaggcagctccttgccagctctcctcctcgcacagccgctcgaaccgcctgctgagccccatggcccgcgccacgctctccgccgcccccagcaatccccggctcctgcgggtggcgctgctgctcctgctcctggtggccgccagccggcgcgcagcaggagcgcccctggccactgaactgcgctgccagtgcttgcagaccctgcagggaattcacctcaagaacatccaaagtgtgaaggtgaagtcccccggaccccactgcgcccaaaccgaagtcatagccacactcaagaatgggcagaaagcttgtctcaaccccgcatcgcccatggttaagaaaatcatcgaaaagatgctgaaaaatggcaaatccaactgaccagaaggaaggaggaagcttattggtggctgttcctgaaggaggccctgcccttacaggaacagaagaggaaagagagacacagctgcagaggccacctggattgcgcctaatgtgtttgagcatcacttaggagaagtcttctatttatttatttatttatttatttgtttgttttagaagattctatgttaatattttatgtgtaaaataaggttatgattgaatctacttgcacactctcccattatatttattgtttattttaggtcaaacccaagttagttcaatcctgattcatatttaatttgaagatagaaggtttgcagatattctctagtcatttgttaatatttcttcgtgatgacatatcacatgtcagccactgtgatagaggctgaggaatccaagaaaatggccagtgagatcaatgtgacggcagggaaatgtatgtgtgtctattttgtaactgtaaagatgaatgtcagttgttatttattgaaatgatttcacagtgtgtggtcaacatttctcatgttgaagctttaagaactaaaatgttctaaatatcccttggacattttatgtctttcttgtaaggcatactgccttgtttaatgttaattatgcagtgtttccctctgtgttagagcagagaggtttcgatatttattgatgttttcacaaagaacaggaaaataaaatatttaaaaata

SEQ ID NO: 82 - DNA, 1075 bp, Homo sapiens
acacagcccgggtcgcaggcacctccccgccagctctcccgcttctcgcacagcttcccgacgcgtctgctgagccccatggcccacgccacgctctccgccgcccccagcaatccccggctcctgcgggtggcgctgctgctcctgctcctggtggccgccagccggcgcgcagcaggagcgtccgtggtcactgaactgcgctgccagtgcttgcagacactgcagggaattcacctcaagaacatccaaagtgtgaatgtaaggtcccccggaccccactgcgcccaaaccgaagtcatagccacactcaagaatgggaagaaagcttgtctcaaccccgcatcccccatggttcagaaaatcatcgaaaagatactgaacaaggggagcaccaactgacaggagagaagtaagaagcttatcagcgtatcattgacacttcctgcagggtggtccctgcccttaccagagctgaaaatgaaaaagagaacagcagctttctagggacagctggaaaggacttaatgtgtttgactatttcttacgagggttctacttatttatgtatttatttttgaaagcttgtattttaatattttacatgctgttatttaaagatgtgagtgtgtttcatcaaacatagctcagtcctgattatttaattggaatatgatgggttttaaatgtgtcattaaactaatatttagtgggagaccataatgtgtcagccaccttgataaatgacagggtggggaactggagggtggggggattgaaatgcaagcaattagtggatcactgttagggtaagggaatgtatgtacacatctattttttatactttttttttaaaaaaagaatgtcagttgttatttattcaaattatctcacattatgtgttcaacatttttatgctgaagtttcccttagacattttatgtcttgcttgtagggcataatgccttgtttaatgtccattctgcagcgtttctctttcccttggaaaagagaatttatcattactgttacatttgtacaaatgacatgataataaaagttttatgaaaaaaaa

SEQ ID NO: 83 - DNA, 3082 bp, Homo sapiens
gcttttggtcattggggtgcctcatattgccagacaagagctcagacctgaggagagtgactagcttctctgtgtcccaggtggccaccttccactgtggaagctcatggactccattgggtcttcagggttgcggcagggggaagaaaccctgagttgctctgaggagggcttgcccgggccctcagacagctcagagctggtgcaggagtgcctgcagcagttcaaggtgacaagggcacagctacagcagatccaagccagcctcttgggttccatggagcaggcgctgaggggacaggccagccctgcccctgcggtccggatgctgcctacatacgtggggtccaccccacatggcactgagcaaggagacttcgtggtgctggagctgggggccacaggggcctcactgcgtgttttgtgggtgactctaactggcattgaggggcatagggtggagcccagaagccaggagtttgtgatcccccaagaggtgatgctgggtgctggccagcagctctttgactttgctgcccactgcctgtctgagttcctggatgcgcagcctgtgaacaaacagggtctgcagcttggcttcagcttctctttcccttgtcaccagacgggcttggacaggagcaccctcatttcctggaccaaaggttttaggtgcagtggtgtggaaggccaggatgtggtccagctgctgagagatgccattcggaggcagggggcctacaacatcgacgtggttgctgtggtgaacgacacagtgggcaccatgatgggctgtgagccgggggtcaggccgtgtgaggttgggctagttgtagacacgggcaccaacgcgtgttacatggaggaggcacggcatgtggcagtgctggacgaagaccggggccgcgtctgcgtcagcgtcgagtggggctccttcagcgatgatggggcgctgggaccagtgctgaccaccttcgaccataccctggaccatgagtccctgaatcctggtgctcagaggtttgagaagatgatcggaggcctgtacctgggtgagctggtgcggctggtgctggctcacttggcccggtgtggggtcctctttggtggctgcacctcccctgccctgctgagccaaggcagcatcctcctggaacacgtggctgagatggaggacccctctactggggcagcccgtgtccatgctatcctgcaggacttgggcctgagccctggggcttcggatgttgagcttgtgcagcacgtctgtgcggccgtgtgcacgcgggctgcccagctctgtgctgccgccctggccgctgttctctcctgcctccagcacagccgggagcaacaaacactccaggttgctgtggccaccggaggccgagtgtgtgagcggcaccccaggttctgcagcgtcctgcaggggacagtgatgctcctggccccggaatgcgatgtctccttaatcccctctgtggatggtggtggccggggagtggcgatggtgactgccgtggctgcccgtctggctgcccaccggcgcctgctggaggagaccctggccccattccggttgaaccatgatcaactggctgcggttcaggcacagatgcggaaggccatggccaaggggctccgaggggaggcctcctcccttcgcatgctgcccactttcgtccgggccacccctgacggcagcgagcgaggggatttcctggccctggacctcgggggcacgaacttccgtgtcctcctggtacgtgtgaccacaggcgtgcagatcaccagcgagatctactccattcccgagactgtggcccagggttctgggcagcagctctttgaccacatcgtggactgcatcgtggacttccagcagaagcagggcctgagcgggcagagcctcccactgggttttaccttctccttcccatgtaggcagcttggcctagaccagggcatcctcctgaactggaccaagggtttcaaggcatcagactgcgagggccaagatgtcgtgagtctgttgcgggaagccatcactcgcagacaggcagtggagctgaatgtggttgccattgtcaatgacacggtggggaccatgatgtcctgtggctatgaggacccccgttgcgagataggcctcattgtcggaaccggcaccaatgcctgctacatggaggagctccggaatgtggcgggcgtgcctggggactcaggccgcatgtgcatcaacatggagtggggcgcctttggggacgatggctctctggccatgctcagcacccgctttgatgcaagtgtggaccaggcgtccatcaaccccggcaagcagaggtttgaaaagatgatcagcggcatgtacctgggggagatcgtccgccacatccttttacatttaaccagccttggcgttctcttccggggccagcagatccagcgccttcagaccagggacatcttcaagaccaagttcctctctgagatcgaaagtgacagcctggccctgcggcaggtccgagccatcctagaggatctggggctacccctgacctcagatgacgccctgatggtgctagaggtgtgccaggctgtgtcccagagggctgcccagctctgtggggcgggtgtagctgccgtggtggagaagatccgggagaaccggggcctggaagagctggcagtgtctgtgggggtggatggaacgctctacaagctgcacccgcgcttctccagcctggtggcggccacagtgcgggagctggcccctcgctgtgtggtcacgttcctgcagtcagaggatgggtccggcaaaggtgcggccctggtcaccgctgttgcctgccgccttgcgcagttgactcgtgtctgaggaaacctccaggctgaggaggtctccgccgcagccttgctggagccgggtcggggtctgcctgtttcccagccaggcccagccacccaggactcctgggacatcccatgtgtgacccctctgcggccatttggccttgctccctggctttccctgagagaagtagcactcaggttagcaatatatatatataatttatttaca

SEQ ID NO: 84 - DNA, 2355 bp, Homo sapiens
agatccgagccgggctggctgcagagaaaccgcagggagagcctcactgctgagcgcccctcgacggcggagcggcagcagcctccgtggcctccagcatccgacaagaagcttcagccatgcaggccccacgggagctcgcggtgggcatcgacctgggcaccacctactcgtgcgtgggcgtgtttcagcagggccgcgtggagatcctggccaacgaccagggcaaccgcaccacgcccagctacgtggccttcaccgacaccgagcggctggtcggggacgcggccaagagccaggcggccctgaacccccacaacaccgtgttcgatgccaagcggctgatcgggcgcaagttcgcggacaccacggtgcagtcggacatgaagcactggcccttccgggtggtgagcgagggcggcaagcccaaggtgcgcgtatgctaccgcggggaggacaagacgttctaccccgaggagatctcgtccatggtgctgagcaagatgaaggagacggccgaggcgtacctgggccagcccgtgaagcacgcagtgatcaccgtgcccgcctatttcaatgactcgcagcgccaggccaccaaggacgcgggggccatcgcggggctcaacgtgttgcggatcatcaatgagcccacggcagctgccatcgcctatgggctggaccggcggggcgcgggagagcgcaacgtgctcatttttgacctgggtgggggcaccttcgatgtgtcggttctctccattgacgctggtgtctttgaggtgaaagccactgctggagatacccacctgggaggagaggacttcgacaaccggctcgtgaaccacttcatggaagaattccggcggaagcatgggaaggacctgagcgggaacaagcgtgccctgcgcaggctgcgcacagcctgtgagcgcgccaagcgcaccctgtcctccagcacccaggccaccctggagatagactccctgttcgagggcgtggacttctacacgtccatcactcgtgcccgctttgaggaactgtgctcagacctcttccgcagcaccctggagccggtggagaaggccctgcgggatgccaagctggacaaggcccagattcatgacgtcgtcctggtggggggctccacacgcatccccaaggtgcagaagttgctgcaggacttcttcaacggcaaggagctgaacaagagcatcaaccctgatgaggctgtggcctatggggctgctgtgcaggcggccgtgttgatgggggacaaatgtgagaaagtgcaggatctcctgctgctggatgtggctcccctgtctctggggctggagacagcaggtggggtgatgaccacgctgatccagaggaacgccactatccccaccaagcagacccagactttcaccacctactcggacaaccagcctggggtcttcatccaggtgtatgagggtgagagggccatgaccaaggacaacaacctgctggggcgttttgaactcagtggcatccctcctgccccacgtggagtcccccagatagaggtgacttttgacattgatgctaatggcatcctgagcgtgacagccactgacaggagcacaggtaaggctaacaagatcaccatcaccaatgacaagggccggctgagcaaggaggaggtggagaggatggttcatgaagccgagcagtacaaggctgaggatgaggcccagagggacagagtggctgccaaaaactcgctggaggcccatgtcttccatgtgaaaggttctttgcaagaggaaagccttagggacaagattcccgaagaggacaggcgcaaaatgcaagacaagtgtcgggaagtccttgcctggctggagcacaaccagctggcagagaaggaggagtatgagcatcagaagagggagctggagcaaatctgtcgccccatcttctccaggctctatggggggcctggtgtccctgggggcagcagttgtggcactcaagcccgccagggggaccccagcaccggccccatcattgaggaggttgattgaatggcccttcgtgataagtcagctgtgactgtcagggctatgctatgggccttctagactgtcttctatgatcctgcccttcagagatgaactttccctccaaagctagaactttcttcccaggataactgaagtcttttgactttttgcggggagggcggttcatcctcttctgcttcaaataaaaagtcattaatttattaaaacttgtgtggcactttaacattgctttcacctatattttgtgtactttgttacttgcatgtatgaattttgttatgtaaaatatagttatagacctaaa

SEQ ID NO: 85 - DNA, 1849 bp, Homo sapiens
actgaggggcaccagaggagcagactacaagaatggcacacgctatggaaaactcctggacaatcagtaaagagtaccatattgatgaagaagtgggctttgctctgccaaatccacaggaaaatctacctgatttttataatgactggatgttcattgctaaacatctgcctgatctcatagagtctggccagcttcgagaaagagttgagaagttaaacatgctcagcattgatcatctcacagaccacaagtcacagcgccttgcacgtctagttctgggatgcatcaccatggcatatgtgtggggcaaaggtcatggagatgtccgtaaggtcttgccaagaaatattgctgttccttactgccaactctccaagaaactggaactgcctcctattttggtttatgcagactgtgtcttggcaaactggaagaaaaaggatcctaataagcccctgacttatgagaacatggacgttttgttctcatttcgtgatggagactgcagtaaaggattcttcctggtctctctattggtggaaatagcagctgcttctgcaatcaaagtaattcctactgtattcaaggcaatgcaaatgcaagaacgggacactttgctaaaggcgctgttggaaatagcttcttgcttggagaaagcccttcaagtgtttcaccaaatccacgatcatgtgaacccaaaagcatttttcagtgttcttcgcatatatttgtctggctggaaaggcaacccccagctatcagacggtctggtgtatgaagggttctgggaagacccaaaggagtttgcagggggcagtgcaggccaaagcagcgtctttcagtgctttgacgtcctgctgggcatccagcagactgctggtggaggacatgctgctcagttcctccaggacatgagaagatatatgccaccagctcacaggaacttcctgtgctcattagagtcaaatccctcagtccgtgagtttgtcctttcaaaaggtgatgctggcctgcgggaagcttatgacgcctgtgtgaaagctctggtctccctgaggagctaccatctgcaaatcgtgactaagtacatcctgattcctgcaagccagcagccaaaggagaataagacctctgaagacccttcaaaactggaagccaaaggaactggaggcactgatttaatgaatttcctgaagactgtaagaagtacaactgagaaatcccttttgaaggaaggttaatgtaacccaacaagagcacattttatcatagcagagacatctgtatgcattcctgtcattacccattgtaacagagccacaaactaatactatgcaatgttttaccaataatgcaatacaaaagacctcaaaatacctgtgcatttcttgtaggaaaacaacaaaaggtaattatgtgtaattatactagaagttttgtaatctgtatcttatcattggaataaaatgacattcaataaataaaaatgcataagatatattctgtcggctgggcgcggtggctcacgcctgtaatcccagcactttgggaggccgaggcgggcggatcacaaggtcaggagatcgagaccatcttggctaacacggtgaaaccccgtctctactaaaaatacaaaaaattagccgggcgcggtggcgggcacctgtagtcccagctactcgggaggctgaggcaggagaatggcgtgaacctgggaggcggagcttgcagtgagccaagattgtgccactgcaatccggcctgggctaaagagcgggactccgtctcaaaaaaaaaaaaaaaaagatatattctgtcataataaataaaaatgcataagatataa

SEQ ID NO: 86 - DNA, 839 bp, Homo sapiens
attctaactgcaacctttcgaagcctttgctctggcacaacaggtagtaggcgacactgttcgtgttgtcaacatgaccaacaagtgtctcctccaaattgctctcctgttgtgcttctccactacagctctttccatgagctacaacttgcttggattcctacaaagaagcagcaattttcagtgtcagaagctcctgtggcaattgaatgggaggcttgaatactgcctcaaggacaggatgaactttgacatccctgaggagattaagcagctgcagcagttccagaaggaggacgccgcattgaccatctatgagatgctccagaacatctttgctattttcagacaagattcatctagcactggctggaatgagactattgttgagaacctcctggctaatgtctatcatcagataaaccatctgaagacagtcctggaagaaaaactggagaaagaagatttcaccaggggaaaactcatgagcagtctgcacctgaaaagatattatgggaggattctgcattacctgaaggccaaggagtacagtcactgtgcctggaccatagtcagagtggaaatcctaaggaacttttacttcattaacagacttacaggttacctccgaaactgaagatctcctagcctgtgcctctgggactggacaattgcttcaagcattcttcaaccagcagatgctgtttaagtgactgatggctaatgtactgcatatgaaaggacactagaagattttgaaatttttattaaattatgagttatttttatttatttaaattttattttggaaaataaattatttttggtgcaaaagtcaa

SEQ ID NO: 87 - DNA, 2846 bp, Homo sapiens
acagggacgcgcgtgcagggcgcagagctgggccgagccgtcgccggcgccacgcgagtcccgcagccgccgcgcccgggcaatgggccgggggcactgagggccgccggggccgagcgcggaggggggaccgagccagtgccgtgccctcgggccgcgccaacatgccccgcggcttcctggtgaagcgcagcaagaagtccacgcccgtttcctaccgggtccgcggcggcgaggacggcgaccgcgcactgctgctctcgcccagctgcgggggcgcccgcgccgagcccccggcgccgagcccggtccccgggccgctgccgccgccgccgcccgcggagcgcgcccatgcagcgctcgccgccgcgcttgcctgcgcgcctgggccgcagccacccccgcagggcccgcgggccgcgcacttcggcaaccccgaggctgcgcaccccgcgccgctctacagtcccacgcggcccgtgagccgcgagcacgagaagcacaagtacttcgaacgcagcttcaacctgggctcgccggtctcggccgagtccttccccacgcccgccgcgctgctcggagggggcggcggcggcggcgcgagcggagctggcggaggcggcacctgcggcggcgacccgctgctcttcgcgcccgccgagctcaagatgggcacggcgttctcggctggcgccgaggcggcccgcggcccgggccccggccccccactgccccctgccgccgccctgcggcccccgggaaagcggcccccgccccctaccgccgcggagccgcccgccaaggcagtcaaggccccgggcgccaagaagcccaaggccatccgcaagctgcacttcgaggacgaggtgaccacgtcgcccgtgctggggctcaagatcaaggagggcccggtggaggcgccgcggggccgcgcggggggcgcggcgcggccgctgggcgagttcatctgccagctgtgcaaggaggagtacgccgacccgttcgcgctggcgcagcacaaatgctcgcgcatcgtgcgtgtggagtaccgctgtcccgagtgcgccaaggtcttcagctgcccggccaacctggcctcgcaccgccgctggcacaaaccgcggcccgcgcccgccgccgcccgcgcgccggagccagaagcagcagccagggctgaggcgcgggaggcacccggcggcggcagcgaccgggacacgccgagccccggcggcgtgtccgagtcgggctccgaggacgggctctacgagtgccatcactgcgccaagaagttccgccgccaggcctacctacgcaagcacctgctggcgcaccaccaggcgctgcaggccaagggcgcgccgctagcgcccccggccgaggacctactggccttgtaccccgggcccgacgagaaggcgccccaggaggcggccggcgacggcgagggggccggcgtgctgggcctgagtgcgtccgccgagtgccacctgtgcccagtgtgcggagagtcgttcgccagcaagggcgctcaggagcgccacctgcgcctgctgcacgccgcccaggtgttcccctgcaagtactgcccggccaccttctacagctcgcccggccttacgcggcacatcaacaagtgccacccatccgaaaacagacaggtgatcctcctgcaggtgcccgtgcgcccggcctgctagagcgcgccctccaccccggcccccgaactgtgccttcgcttggagacccacaaagagagtgcgccctgcactccccgaacccgagtccgcgctgggggagcctcgcccccgcccccaccgggtgaaagtgtcgtctccgcttctctcggtgtggcgtgacggtaaccccatactctccttttgactccttttggaacccccacttttacgttgtgtccctccgcctcccccatggcgcaacaggagtcagtctctttctgtacaagggagaaaagctgtacgcgtttgtctcgtggttggaagcctccccttggcggggagaagctttttttcttgctagtattcgctgtgttcatggtctagaaatgcggtctggtctcgcctcgcctaccaatctctgctctctatgtatgtagcgtacgggttgttttgggtgaatcttgaggaataaatgcctttatatttcacaggctgtaaattgaacttcccacacgattagctttattatggcttgtgaactgctggagtctggctttacctttttgtatgtgaacaaatcaaattgcttaaaaaagagttttctttagtatagccacaaatgccttgaactgttgtctgggattgttttgtggggggagggaagggagtgttccgaagatgctgtagtaactgcctcagtgtttcacgtaagactttttggtttgatcatctttgttgaggtaggactatcagttccctctaaatgtatatgttgatttatgagtaattgttatttattctttatttatttatattaattatgaagattatgatattatttgattgcagatttttttggcgcgctgccccctccccaccctgccactcttgacattccactgtgcgttttagaagagagcctttttctaaagggatctgcttaaagttttaacttttatacctatctgagtgaattacagacaacctatcatttattctgcttcgagggtccccagggcccttgtacaaccgacagctcttacttttaaatgcaatctcttttctacatacattattttcttaattgttagctatttatagaaagcttcaatagaactgtttcaactgtataactatttactattcaaataaaatattttcaaagtcaaa

SEQ ID NO: 88 - DNA, 2257 bp, Homo sapiens
ctctccttgttttgctttcgatctggactgttctcaggcaagccggggagtaacttttagttttgctcctgcgattattcaactgacgggctttcatttccatttcacataccctagcaacacttataccttgcggaattgtattggtagcgtgaaaaaagcacactgagagggcaccatgccggtggaaaggatgcgcatgcgcccgtggctggaggagcagataaactccaacacgatcccggggctcaagtggcttaacaaggaaaagaagatttttcagatcccctggatgcatgcggctagacatgggtgggatgtggaaaaagatgcaccactctttagaaactgggcaatccatacaggaaagcatcaaccaggagtagataaacctgatcccaaaacatggaaggcgaatttcagatgcgccatgaattccttgcctgatattgaagaagtcaaggataaaagcataaagaaaggaaataatgccttcagggtctaccgaatgctgcccctatcagaacggccttctaagaaaggaaagaaaccaaagacagaaaaagaagacaaagttaagcacatcaagcaagaaccagttgagtcatctctggggcttagtaatggagtaagtgatctttctcctgagtatgcggtcctgacttcaactataaaaaatgaagtggatagtacggtgaacatcatagttgtaggacagtcccatctggacagcaacattgagaatcaagagattgtcaccaatccgccagacatttgccaagttgtagaggtgaccactgagagcgacgagcagccggtcagcatgagcgagctctaccctctgcagatctcccccgtgtcttcctatgcagaaagcgaaacgactgatagtgtgcccagcgatgaagagagtgccgaggggcggccacactggcggaagaggaatattgaaggcaaacagtacctcagcaacatggggactcgaggctcctacctgctgcccggcatggcgtccttcgtcacttccaacaaaccggacctccaggtcaccatcaaagaggagagcaatccggtgccttacaacagctcctggcccccttttcaagacctccccctttcttcctccatgaccccagcatccagcagcagtcggccagaccgggagacccgggccagcgtcatcaagaaaacatcggatatcacccaggcccgcgtcaagagctgttaagcctctgactctccgcggtggttgttggggcttcttggctttgttttgttgtttgtttgtattttatttttttctctctgacacctattttagacaaatctaagggaaaaagccttgacaatagaacattgattgctgtgtccaactccagtactggagcttctctttaactcaggactccagcccattggtagacgtgtgtttctagagcctgctggatctcccagggctactcactcaagttcaaggaccaacaagggcagtggaggtgctgcattgcctgcggtcaaggccagcaaggtggagtggatgcctcagaacggacgagataatgtgaactagctggaattttttattcttgtgaatatgtacataggcagcactagcgacattgcagtctgcttctgcaccttatcttaaagcacttacagataggccttcttgtgatcttgctctatctcacagcacactcagcacccccttctctgcccattccccagcctctcttcctatcccatcccatcccatcccatcccatcccatcccatcccgctcttttcctacttttccttccctcaaagcttccattccacatccggaggagaagaaggaaatgaatttctctacagatgtcccattttcagactgctttaaaaaaaatccttctaatctgctatgcttgaatgccacgcggtacaaaggaaaaagtatcatggaaatattatgcaaattcccagatttgaagacaaaaatactctaattctaaccagagcaagcttttttattttttatacaggggaatattttattcaaggtaaaattctaaataaaatataattgttttttatcttttctacagcaaatttataattttaagattccttttcttgtttatcagcagttgttattacatccttgtggcacatttttttttttaattttgtaaaggtgaaaaaagcttttatgagctcatgtagcaatcagattttcctgtggattgataataaatgaatatgatatatagttaaa

SEQ ID NO: 89 - DNA, 1583 bp, Homo sapiens
gcagtagctgagcagtggcagcagagaggcagacgtgagctgagggcgcagaggcaggcagcatctctgagggtccccaaggaacatggctgggagccgtgaggtggtggccatggactgcgagatggtggggctggggccccaccgggagagtggcctggctcgttgcagcctcgtgaacgtccacggtgctgtgctgtacgacaagttcatccggcctgagggagagatcaccgattacagaacccgggtcagcggggtcacccctcagcacatggtgggggccacaccatttgccgtggccaggctagagatcctgcagctcctgaaaggcaagctggtggtgggtcatgacctgaagcacgacttccaggcactgaaagaggacatgagcggctacacaatctacgacacgtccactgacaggctgttgtggcgtgaggccaagctggaccactgcaggcgtgtctccctgcgggtgctgagtgagcgcctcctacacaagagcatccagaacagcctgcttggacacagctcggtggaagatgcgagggcaacgatggagctctatcaaatctcccagagaatccgagcccgccgagggctgccccgcctggctgtgtcagactgaagccccatccagcccgttccgcagggactagaggctttcggctttttgggacagcaactaccttgcttttggaaaatacatttttaatagtaaagtggctctatattttctctacgccatcactgggtcctcttcttattcttctctccaagctgggttaacagtagacaggacccatttctgtgtgatgttaggagggaatgaagtcttatgctggggaggtgggcaagtatcaatttccttaatatcttgaatcctgtgggtccaaaatgtggcttggaaatctaagtagcatgtggcttaattactaatcccaccctttgctgttgcatcccagccctattcctggtgcatttatgcccagagaggtggcattatttcctggggtggcattcagctcctcttgagttggtgccacagcatttgtgggctttgaagcaaaggtacaggaaatgtcaagggtgccaccccggcaaccttgagcaagtcacccctcctatttgtaaaatgaggaaggaaaggtaacaaactgtggagtcagagagaagtaggttggaatcctctttgtcatttagtagctgtttgacctaaggtggtttactgaacttctcagtttctccatctgtaaaatgagaattctagcaactcgtagggtatttgtgagatgttgcaggcaaagcccccagcaccatgcctgtcctagcttaagcacccaccaggtgtcgataagtaattgttcttccctggactgcctgcacatctagggcaccccaggaagagtcaccgcactctgtttcggggctcggctctctgaggggagggcatcctgtatggggaggagggtctggaccagagctgtccctgatcgctagaatcaacggcagaattcttgttattttaataataattaataatttagtgcttccactaaataaaaatcattggaatggtg

SEQ ID NO: 90 - DNA, 3257 bp, Homo sapiens
gctcagagttgcactgagtgtggctgaagcagcgaggcgggagtggaggtgcgcggagtcaggcagacagacagacacagccagccagccaggtcggcagtatagtccgaactgcaaatcttattttcttttcaccttctctctaactgcccagagctagcgcctgtggctcccgggctggtgtttcgggagtgtccagagagcctggtctccagccgcccccgggaggagagccctgctgcccaggcgctgttgacagcggcggaaagcagcggtacccacgcgcccgccgggggaagtcggcgagcggctgcagcagcaaagaactttcccggctgggaggaccggagacaagtggcagagtcccggagccaacttttgcaagcctttcctgcgtcttaggcttctccacggcggtaaagaccagaaggcggcggagagccacgcaagagaagaaggacgtgcgctcagcttcgctcgcaccggttgttgaacttgggcgagcgcgagccgcggctgccgggcgccccctccccctagcagcggaggaggggacaagtcgtcggagtccgggcggccaagacccgccgccggccggccactgcagggtccgcactgatccgctccgcggggagagccgctgctctgggaagtgagttcgcctgcggactccgaggaaccgctgcgcacgaagagcgctcagtgagtgaccgcgacttttcaaagccgggtagcgcgcgcgagtcgacaagtaagagtgcgggaggcatcttaattaaccctgcgctccctggagcgagctggtgaggagggcgcagcggggacgacagccagcgggtgcgtgcgctcttagagaaactttccctgtcaaaggctccggggggcgcgggtgtcccccgcttgccacagccctgttgcggccccgaaacttgtgcgcgcagcccaaactaacctcacgtgaagtgacggactgttctatgactgcaaagatggaaacgaccttctatgacgatgccctcaacgcctcgttcctcccgtccgagagcggaccttatggctacagtaaccccaagatcctgaaacagagcatgaccctgaacctggccgacccagtggggagcctgaagccgcacctccgcgccaagaactcggacctcctcacctcgcccgacgtggggctgctcaagctggcgtcgcccgagctggagcgcctgataatccagtccagcaacgggcacatcaccaccacgccgacccccacccagttcctgtgccccaagaacgtgacagatgagcaggagggcttcgccgagggcttcgtgcgcgccctggccgaactgcacagccagaacacgctgcccagcgtcacgtcggcggcgcagccggtcaacggggcaggcatggtggctcccgcggtagcctcggtggcagggggcagcggcagcggcggcttcagcgccagcctgcacagcgagccgccggtctacgcaaacctcagcaacttcaacccaggcgcgctgagcagcggcggcggggcgccctcctacggcgcggccggcctggcctttcccgcgcaaccccagcagcagcagcagccgccgcaccacctgccccagcagatgcccgtgcagcacccgcggctgcaggccctgaaggaggagcctcagacagtgcccgagatgcccggcgagacaccgcccctgtcccccatcgacatggagtcccaggagcggatcaaggcggagaggaagcgcatgaggaaccgcatcgctgcctccaagtgccgaaaaaggaagctggagagaatcgcccggctggaggaaaaagtgaaaaccttgaaagctcagaactcggagctggcgtccacggccaacatgctcagggaacaggtggcacagcttaaacagaaagtcatgaaccacgttaacagtgggtgccaactcatgctaacgcagcagttgcaaacattttgaagagagaccgtcgggggctgaggggcaacgaagaaaaaaaataacacagagagacagacttgagaacttgacaagttgcgacggagagaaaaaagaagtgtccgagaactaaagccaagggtatccaagttggactgggttgcgtcctgacggcgcccccagtgtgcacgagtgggaaggacttggcgcgccctcccttggcgtggagccagggagcggccgcctgcgggctgccccgctttgcggacgggctgtccccgcgcgaacggaacgttggacttttcgttaacattgaccaagaactgcatggacctaacattcgatctcattcagtattaaaggggggagggggagggggttacaaactgcaatagagactgtagattgcttctgtagtactccttaagaacacaaagcggggggagggttggggaggggcggcaggagggaggtttgtgagagcgaggctgagcctacagatgaactctttctggcctgccttcgttaactgtgtatgtacatatatatattttttaatttgatgaaagctgattactgtcaataaacagcttcatgcctttgtaagttatttcttgtttgtttgtttgggtatcctgcccagtgttgtttgtaaataagagatttggagcactctgagtttaccatttgtaataaagtatataatttttttatgttttgtttctgaaaattccagaaaggatatttaagaaaatacaataaactattggaaagtactcccctaacctcttttctgcatcatctgtagatactagctatctaggtggagttgaaagagttaagaatgtcgattaaaatcactctcagtgcttcttactattaagcagtaaaaactgttctctattagactttagaaataaatgtacctgatgtacctgatgctatggtcaggttatactcctcctcccccagctatctatatggaattgcttaccaaaggatagtgcgatgtttcaggaggctggaggaaggggggttgcagtggagagggacagcccactgagaagtcaaacatttcaaagtttggattgtatcaagtggcatgtgctgtgaccatttataatgttagtagaaattttacaataggtgcttattctcaaagcaggaattggtggcagattttacaaaagatgtatccttccaatttggaatcttctctttgacaattcctagataaaaagatggcctttgcttatgaatatttataacagcattcttgtcacaataaatgtattcaaataccaa

SEQ ID NO: 91 - DNA, 1830 bp, Homo sapiens
gggaccttgagagcggccaggccagcctcggagccagcagggagctgggagctgggggaaacgacgccaggaaagctatcgcgccagagagggcgacgggggctcgggaagcctgacagggcttttgcgcacagctgccggctggctgctacccgcccgcgccagcccccgagaacgcgcgaccaggcacccagtccggtcaccgcagcggagagctcgccgctcgctgcagcgaggcccggagcggccccgcagggaccctccccagaccgcctgggccgcccggatgtgcactaaaatggaacagcccttctaccacgacgactcatacacagctacgggatacggccgggcccctggtggcctctctctacacgactacaaactcctgaaaccgagcctggcggtcaacctggccgacccctaccggagtctcaaagcgcctggggctcgcggacccggcccagagggcggcggtggcggcagctacttttctggtcagggctcggacaccggcgcgtctctcaagctcgcctcttcggagctggaacgcctgattgtccccaacagcaacggcgtgatcacgacgacgcctacacccccgggacagtacttttacccccgcgggggtggcagcggtggaggtgcagggggcgcagggggcggcgtcaccgaggagcaggagggcttcgccgacggctttgtcaaagccctggacgatctgcacaagatgaaccacgtgacaccccccaacgtgtccctgggcgctaccggggggcccccggctgggcccgggggcgtctacgccggcccggagccacctcccgtttacaccaacctcagcagctactccccagcctctgcgtcctcgggaggcgccggggctgccgtcgggaccgggagctcgtacccgacgaccaccatcagctacctcccacacgcgccgcccttcgccggtggccacccggcgcagctgggcttgggccgcggcgcctccaccttcaaggaggaaccgcagaccgtgccggaggcgcgcagccgggacgccacgccgccggtgtcccccatcaacatggaagaccaagagcgcatcaaagtggagcgcaagcggctgcggaaccggctggcggccaccaagtgccggaagcggaagctggagcgcatcgcgcgcctggaggacaaggtgaagacgctcaaggccgagaacgcggggctgtcgagtaccgccggcctcctccgggagcaggtggcccagctcaaacagaaggtcatgacccacgtcagcaacggctgtcagctgctgcttggggtcaagggacacgccttctgaacgtcccctgcccctttacggacaccccctcgcttggacggctgggcacacgcctcccactggggtccagggagcaggcggtgggcacccaccctgggacctaggggcgccgcaaaccacactggactccggccctcctaccctgcgcccagtccttccacctcgacgtttacaagcccccccttccacttttttttgtatgttttttttctgctggaaacagactcgattcatattgaatataatatatttgtgtatttaacagggaggggaagagggggcgatcgcggcggagctggccccgccgcctggtactcaagcccgcggggacattgggaaggggacccccgccccctgccctcccctctctgcaccgtactgtggaaaagaaacacgcacttagtctctaaagagtttattttaagacgtgtttgtgtttgtgtgtgtttgttctttttattgaatctatttaagtaaaaaaaaaattggttctttattaa

SEQ ID NO: 92 - DNA, 6058 bp, Homo sapiens
ccctccctgcgcgccgcctctcactcacagcctcccttccttctttctccctccgcctcccgagcaccagcgcgctctgagctgcccccagggtccctcccccgccgccagcagcccatttggagggaggaagtaagggaagaggagaggaaggggagccggaccgactacccagacagagccggtgaatgggtttgtggtgacccccgccccccaccccaccctcccttcccacccgacccccaacccccatccccagttcgagccgccgcccgaaaggccgggccgtcgtcttaggaggagtcgccgccgccgccacctccgccatggagctgatcaccattctcgagaagaccgtgtctcccgatcggctggagctggaagcggcgcagaagttcctggagcgtgcggccgtggagaacctgcccactttccttgtggaactgtccagagtgctggcaaatccaggaaacagtcaggttgccagagttgcagctggtctacaaatcaagaactctttgacatctaaagatccagatatcaaggcacaatatcagcagaggtggcttgctattgatgctaatgctcgacgagaagtcaagaactatgttttgcagacattgggtacagaaacttaccggcctagttctgcctcacagtgtgtggctggtattgcttgtgcagagatcccagtaaaccagtggccagaactcattcctcagctggtggccaatgtcacaaaccccaacagcacagagcacatgaaggagtcgacattggaagccatcggttatatttgccaagatatagacccagagcagctacaagataaatccaatgagattctgactgccataatccaggggatgaggaaagaagagcctagtaataatgtgaagctagctgctacgaatgcactcctgaactcattggagttcaccaaagcaaactttgataaagagtctgaaaggcactttattatgcaggtggtctgtgaagccacacagtgtccagatacgagggtacgagtggctgctttacagaatctggtgaagataatgtccttatattatcagtacatggagacatatatgggtcctgctctttttgcaatcacaatcgaagcaatgaaaagtgacattgatgaggtggctttacaagggatagaattctggtccaatgtctgtgatgaggaaatggatttggccattgaagcttcagaggcagcagaacaaggacggccccctgagcacaccagcaagttttatgcgaagggagcactacagtatctggttccaatcctcacacagacactaactaaacaggacgaaaatgatgatgacgatgactggaacccctgcaaagcagcaggggtgtgcctcatgcttctggccacctgctgtgaagatgacattgtcccacatgtcctccccttcattaaagaacacatcaagaacccagattggcggtaccgggatgcagcagtgatggcttttggttgtatcttggaaggaccagagcccagtcagctcaaaccactagttatacaggctatgcccaccctaatagaattaatgaaagaccccagtgtagttgttcgagatacagctgcatggactgtaggcagaatttgtgagctgcttcctgaagctgccatcaatgatgtctacttggctcccctgctacagtgtctgattgagggtctcagtgctgaacccagagtggcttcaaatgtgtgctgggctttctccagtctggctgaagctgcttatgaagctgcagacgttgctgatgatcaggaagaaccagctacttactgcttatcttcttcatttgaactcatagttcagaagctcctagagactacagacagacctgatggacaccagaacaacctgaggagttctgcatatgaatctctgatggaaattgtgaaaaacagtgccaaggattgttatcctgctgtccagaaaacgactttggtcatcatggaacgactgcaacaggttcttcagatggagtcacatatccagagcacatccgatagaatccagttcaatgaccttcagtctttactctgtgcaactcttcagaatgttcttcggaaagtgcaacatcaagatgctttgcagatctctgatgtggttatggcctccctgttaaggatgttccaaagcacagctgggtctgggggagtacaagaggatgccctgatggcagttagcacactggtggaagtgttgggtggtgaattcctcaagtacatggaggcctttaaacccttcctgggcattggattaaaaaattatgctgaataccaggtttgtttggcagctgtgggcttagtgggagacttgtgccgtgccctgcaatccaacatcatacctttctgtgacgaggtgatgcagctgcttctggaaaatttggggaatgagaacgtccacaggtctgtgaagccgcagattctgtcagtgtttggtgatattgcccttgctattggaggagagtttaaaaaatacttagaggttgtattgaatactcttcagcaggcctcccaagcccaggtggacaagtcagactatgacatggtggattatctgaatgagctaagggaaagctgcttggaagcctatactggaatcgtccagggattaaagggggatcaggagaacgtacacccggatgtgatgctggtacaacccagagtagaatttattctgtctttcattgaccacattgctggagatgaggatcacacagatggagtagtagcttgtgctgctggactaataggggacttatgtacagcatttgggaaggatgtactgaaattagtagaagctaggccaatgatccatgaattgttaactgaagggcggagatcgaagactaacaaagcaaaaacccttgctacatgggcaacaaaagaactgaggaaactgaagaaccaagcttgatctgttaccattgggatgataacctgaggacccccactggaaatctcccatcttttgaaaaacctggaagtgaggagtgtgcacggatgctgaatgtttgggaatgagaggatgagtgagtgaggcttgaaaacacaccacattgaaaatcctgccacagcagcagccgcagccgccaacagcagcgctgttagtgagctaagtaagcactgacttcgtagaaaaccataacatcggccatcttggaaaagagaaaaacaatggagttacttatttaaaaaaaaagaaagaaagttatctcttcccaggagaggctagaagtagcttttctgtcttttggccagtgccgagtggaatgcctggtttgggggaggaggagggactgggttcagctgtggtgctttgttgtaaaaggcagcctggcctttgctactgaggagaaagatggagcctgggtctcaagcccaccttcgctgtacctttgccacatggtactgtatgcttgccagctagaaggagggtcagggattttttacagtctgagaatgagtgtgtgtgagtgaggcggtatccacattctcaacttcaagtcattgcagtttctttttcccagaaaacaaggggttagatgttgcatttcataaaactaaccgaagttttgtttactgatgcagcacaagagatgtaaaaaaaaaaaaaaaaaaaaaaaaaaaaacacacacacagaggaaagacgctctttaggttttgttttgttttttttttttggttttgttttttgttttttttactctagggaaaacactgacgaatggtcagagctcctatcctgatcttttcatcaaggcgcctttcctaataatatggttcaactgtgaatgtagaagtgggggggaggggggagaaaaagaaaactctggcgttagaggatatagaaaaatataagtacaattgttacaaataacgcagacttcaaaaacaaaaaaatcacaacccaaacaaaccaaaatttaaatgatcagaattggcagcacaaagaaaacgccctctcctgacttgtattgtggcagtctgaacgcccccagaaaattgtgccaaagagtttagaaaaataaatatacaataaaagtaaacacatacacacaaaacagcaaacttcaggtaactattttggattgcaaacaggataaattaaatgttcaaacaatctgataaaataaccatttggaaactgcttggccttctgttcttttatttgattgactacaatgcggtattggtctcttgctgcacttcaaaagcaaccaacaaaacaaaaacaaaaaaaagtgtgtgttgtgtgaatacacacacacactaactagaagtcttgtgatgaaaatggcacttggaaaaggttttatttttccactgaagttgaaggttaataaaatggtgtcaaacgtcccctggtcacacacttgaatatttttttagaagtgtgatgtggtatgattaccataaatcagacttaattattttcccttttacaagggaacagggcatcctgaattttagagcctttcagcaataagaagggatgttggtgagctttgatcctcttttggttttgcagttgttaggagtttttgctggcattttgaatatgctgctttcagaaaaaccaaggaagttttaaaattgcttcctggtccttagaggactaaaaacaagaccctcattcccactttcatttccactctagcaaaaactgggcttgcgtttttctccaactcctcgtttatatcctcccttccatgtccaagccttccattcctaagtgggattggctcagttttgcccatccatatggcagcatctctaatagctcttgtacagggtatcagatattgtgccttttggtgccaggttcaaagtcaagtgccgatctatgaaccagtgtacaaaaaaaaaaaaatccaggtatttgaaggagagacgctccattgtgaataaagagctcataccagctcctaagccctattaagaagaggcctggtcctctaatgccttgtttccatttcagttgttctttgagagacagaatgatgtactaaccattcgtgattattaagatagggttgggtcagggcttagggagggggcagaaatattggggatagaaaaaaaatctgatcattcctcagtgctacccatttctgtcctgtgtgggctgcttagctagacagcaggagaataaagtacaccgagaaccataatgaaaaaaccttccgtgtgttttgtcatgttttgttccagggaagcagttgatgagtgctgttactaatgctttctcccagatccattcagtggtggagaggaggaaaatgggctggttggatgtggtcttggtgccttgcagttactctgcactggttatgcatttaattctcctcttttctagttaaccttttgccagtgggttttccatagtctgggtatttgtccttatatcagttataccacctaaggcaactgggtgcaaaatgcattctgttcactcactgtctgggccttccccaccctagtcttggcacattccttcaagaatgtagttaccgtctgcttgggaagatgtcagtgcaaatgtgaagataatgggcatcggactaggctttggtttgccacaagtggcagctgcctgtatcaattacatttattaattttgcttttcatttttcccagttctcctcaccccccctttgttgaaatgttggacttgctgtcagaggcaactgtaatattgccttagggacttgtggagaaggggaattgctcagtgtagtgttttaactttcagaaccaagcaatctatttactcttacaaatatttaagaagtgtgttagtccaactttaagaaaaatccaaactcatcagcttttgatagcatcttggtttttgaaacaacttcaatctgtaattggcattcagaatgcccttggcatgccagtctgtgatggcatttaagacctgtaaaacacttgagcccaactcgattaaccaaaaccgataaccaccacctttatcttctaaataaagtccgctttatttttattttcaa

SEQ ID NO: 93 - DNA, 1976 bp, Homo sapiens
agagaccagcagaacggcatcccagccacgacggccactttgctctgtctgctctccgccacggccctgctctgttccctgggacacccccgcccccacctcctcaggctgcctgatctgcccagctttccagctttcctctggattccggcctctggtcatccctccccaccctctctccaaggccctctcctggtctcccttcttctagaaccccttcctccacctccctctctgcagaacttctcctttaccccccaccccccaccactgccccctttccttttctgacctccttttggagggctcagcgctgcccagaccataggagagatgtgggaggctcagttcctgggcttgctgtttctgcagccgctttgggtggctccagtgaagcctctccagccaggggctgaggtcccggtggtgtgggcccaggagggggctcctgcccagctcccctgcagccccacaatccccctccaggatctcagccttctgcgaagagcaggggtcacttggcagcatcagccagacagtggcccgcccgctgccgcccccggccatcccctggcccccggccctcacccggcggcgccctcctcctgggggcccaggccccgccgctacacggtgctgagcgtgggtcccggaggcctgcgcagcgggaggctgcccctgcagccccgcgtccagctggatgagcgcggccggcagcgcggggacttctcgctatggctgcgcccagcccggcgcgcggacgccggcgagtaccgcgccgcggtgcacctcagggaccgcgccctctcctgccgcctccgtctgcgcctgggccaggcctcgatgactgccagccccccaggatctctcagagcctccgactgggtcattttgaactgctccttcagccgccctgaccgcccagcctctgtgcattggttccggaaccggggccagggccgagtccctgtccgggagtccccccatcaccacttagcggaaagcttcctcttcctgccccaagtcagccccatggactctgggccctggggctgcatcctcacctacagagatggcttcaacgtctccatcatgtataacctcactgttctgggtctggagcccccaactcccttgacagtgtacgctggagcaggttccagggtggggctgccctgccgcctgcctgctggtgtggggacccggtctttcctcactgccaagtggactcctcctgggggaggccctgacctcctggtgactggagacaatggcgactttacccttcgactagaggatgtgagccaggcccaggctgggacctacacctgccatatccatctgcaggaacagcagctcaatgccactgtcacattggcaatcatcacagtgactcccaaatcctttgggtcacctggatccctggggaagctgctttgtgaggtgactccagtatctggacaagaacgctttgtgtggagctctctggacaccccatcccagaggagtttctcaggaccttggctggaggcacaggaggcccagctcctttcccagccttggcaatgccagctgtaccagggggagaggcttcttggagcagcagtgtacttcacagagctgtctagcccaggtgcccaacgctctgggagagccccaggtgccctcccagcaggccacctcctgctgtttctcatccttggtgtcctttctctgctccttttggtgactggagcctttggctttcacctttggagaagacagtggcgaccaagacgattttctgccttagagcaagggattcaccctccgcaggctcagagcaagatagaggagctggagcaagaaccggagccggagccggagccggaaccggagcccgagcccgagcccgagccggagcagctctgacctggagctgaggcagccagcagatctcagcagcccagtccaaataaactccctgtcagcagcaa

SEQ ID NO: 94 - DNA, 1131 bp, Homo sapiens
agagcgcgcgaggttcggggagctcggccaggctgctggtacctgcgtccgcccggcgagcaggacaggctgctttggtttgtgacctccaggcaggacggccatcctctccagaatgaagatcttcttgccagtgctgctggctgcccttctgggtgtggagcgagccagctcgctgatgtgcttctcctgcttgaaccagaagagcaatctgtactgcctgaagccgaccatctgctccgaccaggacaactactgcgtgactgtgtctgctagtgccggcattgggaatctcgtgacatttggccacagcctgagcaagacctgttccccggcctgccccatcccagaaggcgtcaatgttggtgtggcttccatgggcatcagctgctgccagagctttctgtgcaatttcagtgcggccgatggcgggctgcgggcaagcgtcaccctgctgggtgccgggctgctgctgagcctgctgccggccctgctgcggtttggcccctgaccgcccagaccctgtcccccgatcccccagctcaggaaggaaagcccagccctttctggatcccacagtgtatgggagcccctgactcctcacgtgcctgatctgtgcccttggtcccaggtcaggcccaccccctgcacctccacctgccccagcccctgcctctgccccaagtggggccagctgccctcacttctggggtggatgatgtgaccttccttgggggaccgcggaagggacgagggttccctggagtcttacggtccaacatcaggaccaagtcccatggacatgctgacagggtccccagggagaccgtgtcagtagggatgtgtgcctggctgtgtacgtgggtgtgcagtgcacgtgagagcacgtggcggcttctgggggccatgtttggggagggaggtgtgccagcagcctggagagcctcagtccctgtagccccctgccctggcacagctgcatgcacttcaagggcagcctttgggggttggggtttctgccacttccgggtctaggccctgccccaaatccagccagtcctgccccagcccacccccacattggagccctcctgctgctttggtgcctcaaataaatacagatgtccccca

SEQ ID NO: 95 - DNA, 2761 bp, Homo sapiens
aaagaatttctcaggctcaaaatccaatacaggagtgacttggaactccattctatcactatgaagaaaagtggtgttcttttcctcttgggcatcatcttgctggttctgattggagtgcaaggaaccccagtagtgagaaagggtcgctgttcctgcatcagcaccaaccaagggactatccacctacaatccttgaaagaccttaaacaatttgccccaagcccttcctgcgagaaaattgaaatcattgctacactgaagaatggagttcaaacatgtctaaacccagattcagcagatgtgaaggaactgattaaaaagtgggagaaacaggtcagccaaaagaaaaagcaaaagaatgggaaaaaacatcaaaaaaagaaagttctgaaagttcgaaaatctcaacgttctcgtcaaaagaagactacataagagaccacttcaccaataagtattctgtgttaaaaatgttctattttaattataccgctatcattccaaaggaggatggcatataatacaaaggcttattaatttgactagaaaatttaaaacattactctgaaattgtaactaaagttagaaagttgattttaagaatccaaacgttaagaattgttaaaggctatgattgtctttgttcttctaccacccaccagttgaatttcatcatgcttaaggccatgattttagcaatacccatgtctacacagatgttcacccaaccacatcccactcacaacagctgcctggaagagcagccctaggcttccacgtactgcagcctccagagagtatctgaggcacatgtcagcaagtcctaagcctgttagcatgctggtgagccaagcagtttgaaattgagctggacctcaccaagctgctgtggccatcaacctctgtatttgaatcagcctacaggcctcacacacaatgtgtctgagagattcatgctgattgttattgggtatcaccactggagatcaccagtgtgtggctttcagagcctcctttctggctttggaagccatgtgattccatcttgcccgctcaggctgaccactttatttctttttgttcccctttgcttcattcaagtcagctcttctccatcctaccacaatgcagtgcctttcttctctccagtgcacctgtcatatgctctgatttatctgagtcaactcctttctcatcttgtccccaacaccccacagaagtgctttcttctcccaattcatcctcactcagtccagcttagttcaagtcctgcctcttaaataaacctttttggacacacaaattatcttaaaactcctgtttcacttggttcagtaccacatgggtgaacactcaatggttaactaattcttgggtgtttatcctatctctccaaccagattgtcagctccttgagggcaagagccacagtatatttccctgtttcttccacagtgcctaataatactgtggaactaggttttaataattttttaattgatgttgttatgggcaggatggcaaccagaccattgtctcagagcaggtgctggctctttcctggctactccatgttggctagcctctggtaacctcttacttattatcttcaggacactcactacagggaccagggatgatgcaacatccttgtctttttatgacaggatgtttgctcagcttctccaacaataagaagcacgtggtaaaacacttgcggatattctggactgtttttaaaaaatatacagtttaccgaaaatcatataatcttacaatgaaaaggactttatagatcagccagtgaccaaccttttcccaaccatacaaaaattccttttcccgaaggaaaagggctttctcaataagcctcagctttctaagatctaacaagatagccaccgagatccttatcgaaactcattttaggcaaatatgagttttattgtccgtttacttgtttcagagtttgtattgtgattatcaattaccacaccatctcccatgaagaaagggaacggtgaagtactaagcgctagaggaagcagccaagtcggttagtggaagcatgattggtgcccagttagcctctgcaggatgtggaaacctccttccaggggaggttcagtgaattgtgtaggagaggttgtctgtggccagaatttaaacctatactcactttcccaaattgaatcactgctcacactgctgatgatttagagtgctgtccggtggagatcccacccgaacgtcttatctaatcatgaaactccctagttccttcatgtaacttccctgaaaaatctaagtgtttcataaatttgagagtctgtgacccacttaccttgcatctcacaggtagacagtatataactaacaaccaaagactacatattgtcactgacacacacgttataatcatttatcatatatatacatacatgcatacactctcaaagcaaataatttttcacttcaaaacagtattgacttgtataccttgtaatttgaaatattttctttgttaaaatagaatggtatcaataaatagaccattaatcagaaaacagatcttgattttttttctcttgaatgtacccttcaactgttgaatgtttaatagtaaatcttatatgtccttatttactttttagctttctctcaaataaagtgtaacactagttgagataacacatgaaagctctttaaagggtcgatcgggaacaggaaaaaaaacctatggaaaatatgacaacac

SEQ ID NO: 96 - DNA, 17911 bp, Homo sapiens
acccggcccggctccctccctgcccgtccccgtccccccacccgtgccagcccccaggatgggtgccccgagcgcgtgccggacgctggtgttggctctggcggccatgctcgtggtgccgcaggcagagacccagggccctgtggagccgagctgggagaatgcagggcacaccatggatggcggtgccccgacgtcctcgcccacccggcgcgtgagctttgttccacccgtcactgtcttccccagcctgagccccctgaacccggcgcacaatgggcgggtgtgcagcacctggggtgacttccactacaagaccttcgacggcgacgtcttccgcttccctggcctttgcaactacgtgttctctgagcactgccgcgccgcctacgaggacttcaacgtccagctacgccgaggcctagtgggctccaggcctgtggtcacccgtgttgtcatcaaggcccaggggctggtgctggaggcgtccaacggctccgtcctcatcaatgggcagcgggaggagctgccttacagccgcactggcctcctggtggagcagagcggggactacatcaaggtcagcatccggctggtgctgacattcctgtggaacggagaggacagtgccctgctggagctggatcccaaatacgccaaccagacctgtggcctgtgtggggacttcaacggcctcccggccttcaacgagttctatgcccacaacgccaggctgaccccgctccagtttgggaacctgcagaagttggatgggcccacggagcagtgcccggacccgctgcccttgccggccggcaactgcacggacgaggagggcatctgccaccgcaccctgctggggccggcctttgcggagtgccacgcactggtggacagcactgcgtacctggccgcctgcgcccaggacctgtgccgctgccccacctgcccgtgtgccacctttgtggaatactcacgccagtgcgcccacgcggggggccagccgcggaactggaggtgccctgagctctgcccccggacctgccccctcaacatgcagcaccaggagtgtggctcaccctgcacggacacctgctccaacccccagcgcgcgcagctctgcgaggaccactgtgtggacggctgcttctgccccccaggcacggtgctggatgacatcacgcactctggctgcctgcccctcgggcagtgcccctgcacccacggcggccgcacctacagcccgggcacctccttcaacaccacctgcagctcctgcacctgctccggggggctatggcagtgccaggacctgccgtgccctggcacctgctctgtgcagggcggggcccacatctccacctatgatgagaaactctacgacctgcatggtgactgcagctacgttctgtccaagaaatgtgccgacagcagcttcaccgtgctggctgagctgcggaagtgcggcctgacggacaacgagaactgcctgaaagcggtgacgctcagcctggacggcggggacacggccatccgggtccaagcggacggcggcgtgttcctcaactccatctacacgcagctgcccctgtcggcagccaacatcaccctgttcacaccctcgagcttcttcatcgtggtgcagacaggcctggggctgcagctgctggtgcagctggtgccactcatgcaggtgtttgtcaggctggaccccgcccaccagggccagatgtgcggcctgtgtgggaacttcaaccagaaccaggctgacgacttcacggccctcagcggggtggtggaggccacgggcgcagccttcgccaacacctggaaggcccaggctgcctgtgccaatgccaggaacagctttgaggacccctgctccctcagtgtggagaatgagaactacgcccggcactggtgctcgcgcctgaccgatcccaacagtgccttctcgcgctgccactccatcatcaaccccaagcccttccactcgaactgcatgtttgacacctgcaactgtgagcggagcgaggactgcctgtgcgccgcgctgtcctcctatgtgcacgcctgtgccgccaagggcgtacagctcagcgactggagggacggcgtctgcaccaagtacatgcagaactgccccaagtcccagcgctacgcctacgtggtggatgcctgccagcccacttgccgcggcctgagtgaggccgacgtcacctgcagcgtttccttcgtgcctgtggacggctgcacctgccccgcgggcaccttcctcaatgacgcgggcgcctgtgtgcccgcccaggagtgcccctgctacgctcacggcaccgtgctggctcctggagaggtggtgcacgacgagggcgccgtgtgttcatgtacgggtgggaagctaagctgcctgggagcctctctgcagaaaagcacagggtgtgcagcccccatggtgtacctggactgcagcaacagctcggcgggcacccctggggccgagtgcctccggagctgccacacgctggacgtgggctgtttcagcacacactgcgtgtccggctgtgtctgtcccccggggctggtgtcggatgggagtgggggctgcattgccgaggaggactgcccctgtgtgcacaacgaggccacctacaagcctggagagaccatcagggtcgactgcaacacctgcacctgcaggaaccggaggtgggagtgcagccaccggctctgcctgggcacctgcgtggcctacggggatggccacttcatcacctttgatggcgatcgctacagctttgaaggcagctgcgagtacatcttggcccaggactactgtggggacaacaccacccacgggaccttccgcatcgtcaccgagaacatcccctgtgggaccaccggcaccacctgctccaaggccatcaagctcttcgtggagagctacgagctgatcctccaagaggggacctttaaggcggtggcgagagggccgggtggggacccaccctacaagatacgctacatggggatcttcctggtcatcgagacccacgggatggccgtgtcctgggaccggaagaccagcgtgttcatccgactgcaccaggactacaagggcagggtctgcggcctgtgcgggaacttcgacgacaatgccatcaatgactttgccacgcgtagccggtccgtggtgggggacgcactggagtttgggaacagctggaagctctccccctcctgcccggacgccctggcacccaaggacccctgcacggccaaccccttccgcaagtcctgggcccagaagcagtgcagcatcctccacggccccaccttcgccgcctgccgctcccaggttgactccaccaagtactacgaggcctgcgtgaacgacgcgtgtgcctgcgactcgggtggcgactgcgagtgtttctgcacggctgtggctgcctacgcccaggcctgccacgacgcgggcctgtgtgtgtcctggcggactccggacacctgccccttgttctgtgacttctacaacccacatgggggctgtgagtggcactaccagccctgcggggcaccctgcctaaaaacctgccggaaccccagtgggcactgcctggtggacctgcctggcctggaaggctgctacccgaagtgcccacccagccagcccttcttcaatgaggaccagatgaagtgcgtggcccagtgtggctgctacgacaaggacggaaactactatgacgtcggtgcaagggtccccacagcggagaactgccagagctgtaactgcacacccagtggcatccagtgcgctcacagccttgaggcctgcacctgcacctatgaggacaggacctacagctaccaggacgtcatctacaacaccaccgatgggcttggcgcctgcttgatcgccatctgcggaagcaacggcaccatcatcaggaaggctgtggcatgtcctggaactccagccacaacgccattcaccttcaccaccgcctgggtcccccactccacgacaagcccggccctcccggtctccaccgtgtgtgtccgcgaggtctgccgctggtccagctggtacaatgggcaccgcccagagcccggcctgggaggcggagactttgagacgtttgaaaacctgaggcagagagggtaccaggtatgccctgtgctggctgacatcgagtgccgggcggcgcagcttcccgacatgccgctggaggagctgggccagcaggtggactgtgaccgcatgcgggggctgatgtgcgccaacagccaacagagtcccccgctctgtcacgactacgagctgcgggttctctgctgcgaatacgtgccctgtggcccctccccggccccaggcaccagccctcagccctccctcagtgccagcacggagcctgctgtgcctaccccaacccagaccacagcaaccgaaaagaccaccctatgggtgaccccgagcatccggtcgacggcggccctcacctcgcagactgggtccagctcaggccccgtgacggtcaccccctcggccccaggtaccaccacctgccagccccggtgtcagtggacagagtggtttgatgaggactaccccaagtctgaacaacttggaggggacgttgagtcctacgataagatcagggccgctggagggcacttatgccagcagcctaaggacatagagtgccaggccgagagcttccccaactggaccctggcacaggtggggcagaaggtgcactgtgacgtccacttcggcctggtgtgcaggaactgggagcaggagggcgtcttcaagatgtgctacaactacaggatccgggtcctctgctgcagtgacgaccactgcaggggacgtgccacaaccccgccaccgaccacagagctggagacggccaccaccaccaccacccaggccctgttctcaacgccgcagcctacgagtagcccggggctgaccagggctcccccggccagcaccacagcagtccccaccctctcagaaggactgacatcccccagatacacaagcacccttggtacagccaccacgggaggccccacgacgcctgcaggctccacagaacccactgtcccaggggtggccacatccacccttccaacacgctcagcccttccagggacgacggggagcttgggcacatggcgcccctcacagccacccacgctggccccaacaacaatggcaacctccagagctcgcccgacaggcacagccagcaccgcttccaaagagccgctgaccacgagcctggcgccaacactcacgagcgagctgtccacctctcaggccgagaccagcacgcccaggacagagacgacaatgagccccttgactaacaccaccaccagccagggcacgacccgctgtcaaccgaagtgtgagtggacagagtggtttgacgtggacttcccaacctcaggggttgcaggcggggacatggaaacttttgaaaacatcagggctgctgggggcaagatgtgctgggcaccaaagagcatagagtgccgggcggagaactaccccgaggtaagcatcgaccaggtcgggcaggtgctgacctgcagcctggagacggggctgacctgcaagaacgaagaccagacaggcaggttcaacatgtgcttcaactacaacgtgcgtgtgctttgctgtgacgactacagccactgccccagtaccccagccaccagctccacggccacgccctcctcaactccggggacgacctggatcctcacaaagccgaccacaacagccactacgactgcgtccactggatccacggccaccccgacctccaccctgagaacagctccccctcccaaagtgctgaccaccacggccaccacacccacagtcaccagctccaaagccactccctcctccagtccagggactgcaaccgcccttccagcactgagaagcacagccaccacacccacagctaccagcgttacacccatcccctcttcctccctgggcaccacctggacccgcctatcacagaccaccacacccacggccaccatgtccacagccacaccctcctccactccagagactgcccacacctccacagtgcttaccgccacggccaccacaactggggccaccggctctgtggccaccccctcctccaccccaggaacagctcacactaccaaagtgccaactaccacaaccacgggcttcacagccaccccctcctccagcccagggacggcactcacgcctccagtgtggatcagcacaaccaccacacccacaaccagaggctccacggtgaccccctcctccatcccggggaccacccacaccgccacagtgctgaccaccaccaccacaactgtggccactggttctatggcaacaccctcctctagcacacagaccagtggtactcccccatcactgaccaccacggccactacgatcacggccaccggctccaccaccaacccctcctcaactcctgggacaactcccatccccccagtgctgaccaccaccgccaccacacctgcagccaccagcaacacagtgactccctcctctgccctagggaccacccacacacccccagtgccgaacaccatggccaccacacacgggcgatccctgccccccagcagtccccacacggtgcgcacagcctggacttcggccacctcgggcatcttgggcaccacccacatcacagagccttccacggtgacttcccacaccctagcagcaaccaccggtaccacccagcactcgactccagccctttccagccctcaccctagcagcagaaccaccgagtcacccccttctccagggacgaccaccccgggccacaccacggccacctccaggaccacagccacggccacacccagcaagacccgcacctcgaccctgctgcccagcagccccacatcggcccccataaccacggtggtgaccatgggctgtgagccccagtgtgcctggtcagagtggctggactacagctaccccatgccggggccctctggcggggactttgacacctactccaacatccgtgcggccggaggggccgtctgtgagcagcccctgggcctcgagtgccgtgcccaggcccagcctggtgtccccctgcgggagttgggccaggtcgtggaatgcagcctggactttggcctggtctgcaggaaccgtgagcaggtggggaagttcaagatgtgcttcaactatgaaatccgtgtgttctgctgcaactacggccactgccccagcaccccggccaccagctctacggccatgccctcctccactccggggacgacctggatcctcacagagctgaccacaacagccactacgactgagtccactggatccacggccaccccgtcctccaccccagggaccacctggatcctcacagagccgagcactacagccaccgtgacggtgcccaccggatccacggccaccgcctcctccacccaggcaactgctggcaccccacatgtgagcaccacggccacgacacccacagtcaccagctccaaagccactcccttctccagtccagggactgcaaccgcccttccagcactgagaagcacagccaccacacccacagctaccagctttacagccatcccctcctcctccctgggcaccacctggacccgcctatcacagaccaccacacccacggccaccatgtccacagccacaccctcctccactccagagactgtccacacctccacagtgcttaccaccacggccaccacaaccggggccaccggctctgtggccaccccctcctccaccccaggaacagctcacactaccaaagtgctgactaccacaaccacgggcttcacagccaccccctcctccagcccagggacggcacgcacgcttccagtgtggatcagcacaaccaccacacccacaaccagaggttccacggtgaccccctcctccatcccggggaccacccacacccccacagtgctgaccaccaccaccacaactgtggccactggttctatggcaacaccctcctctagcacacagaccagtggtactcccccatcactgaccaccacggccactacgatcacggccaccggctccaccaccaacccctcctcaactccagggacaacacctatccccccagtgctgaccaccaccgccaccacacctgcagccaccagcagcacagtgactccctcctctgccctagggaccacccacacacccccagtgccgaacaccacggccaccacacacgggcgatccctgtcccccagcagtccccacacggtgcgcacagcctggacttcggccacctcaggcaccttgggcaccacccacatcacagagccttccacggggacttcccacaccccagcagcaaccaccggtaccacccagcactcgactccagccctgtccagccctcaccctagcagcaggaccaccgagtcacccccttctccagggacgaccaccccgggccacaccagggccacctccaggaccacggccacggccacacccagcaagacccgcacctcgaccctgctgcccagcagccccacatcggccccaataaccacggtggtgaccatgggctgtgagccccagtgtgcctggtcagagtggctggactacagctaccccatgccggggccctctggcggggactttgacacctactccaacatccgtgcggccggaggggccgtctgtgagcagcccctgggcctcgagtgccgtgcccaggcccagcctggtgtccccctgcgggagttgggccaggtcgtggaatgcagcctggactttggcctggtctgcaggaaccgtgagcaggtggggaagttcaagatgtgcttcaactatgaaatccgtgtgttctgctgcaactacggccactgccccagcaccccggccaccagctctacggccacgccctcctccactccagggacgacctggatcctcacagagcagaccacagcagccactacgaccgcaaccactggatccacggccatcccgtcctccaccccgggaacagctccccctcccaaagtgctgaccagcacggccaccacacccacagccaccagttccaaagccacttcctcctccagtccaaggactgcaaccacccttccagtgctgacaagcacagccaccaaatccacagctaccagctttacacccatcccctccttcacccttgggaccaccgggaccctcccagaacagaccaccacacccatggccaccatgtccacaatccacccctcctccactccggagaccacccacacctccacagtgctgaccacgaaggccaccacgacaagggccaccagttccatgtccaccccctcctccactccggggacgacctggatcctcacagagctgaccacagcagccactacaactgcagccactggccccacggccaccccgtcctccaccccagggaccacctggatcctcacagagcccagcactacagccaccgtgacggtgcccaccggatccacggccaccgcctcctccacccgggcaactgctggcaccctcaaagtgctgaccagcacggccaccacacccacagtcatcagctccagagccactccctcctccagtccagggactgcaaccgcccttccagcactgagaagcacagccaccacacccacagctaccagcgttacagccatcccctcttcctccctgggcaccgcctggacccgcctatcacagaccaccacacccacggccaccatgtccacagccacaccctcctctactccagagactgtccacacctccacagtgcttaccaccacgaccaccacaaccagggccaccggctctgtggccaccccctcctccaccccaggaacagctcacactaccaaagtgccgactaccacaaccacgggcttcacagccaccccctcctccagcccagggacggcactcacgcctccagtgtggatcagcacaaccaccacacccacaaccagaggctccacggtgaccccctcctccatcccggggaccacccacaccgccacagtgctgaccaccaccaccacaactgtggccactggttctatggcaacaccctcctctagcacacagaccagtggtactcccccatcactgaccaccacggccactacgatcacagccaccggctccaccaccaacccctcctcaactccagggacaactcccatccccccagtgctgaccaccaccgccaccacacctgcagccaccagcagcacagtgactccctcctctgccctagggaccacccacacacccccagtgccgaacaccacggccaccacacacgggcggtccctgccccccagcagtccccacacggtgcgcacagcctggacttcggccacctcgggcatcttgggcaccacccacatcacagagccttccacggtgacttcccacaccccagcagcaaccaccagtaccacccagcactcgactccagccctgtccagccctcaccctagcagcaggaccaccgagtcacccccttctccagggacgaccaccccgggccacaccaggggcacctccaggaccacagccacagccacacccagcaagacccgcacctcgaccctgctgcccagcagccccacatcggcccccataaccacggtggtgaccacgggctgtgagccccagtgtgcctggtcagagtggctggactacagctaccccatgccggggccctctggcggggactttgacacctactccaacatccgtgcggccggaggggcagtctgtgagcagcccctgggcctcgagtgccgtgcccaggcccagcctggtgtccccctgcgggagttgggccaggtcgtggaatgcagcctggactttggcctggtctgcaggaaccgtgagcaggtggggaagttcaagatgtgcttcaactatgaaatccgtgtgttctgctgcaactacggccactgccccagcaccccggccaccagctctacggccacgccctcctcaactccggggacgacctggatcctcacaaagctgaccacaacagccactacgactgagtccactggatccacggccaccccgtcctccaccccagggaccacctggatcctcacagagccgagcactacagccaccgtgacggtgcccaccggatccacggccaccgcctcctccacccaggcaactgctggcaccccacatgtgagcaccacggccacgacacccacagtcaccagctccaaagccactcccttctccagtccagggactgcaaccgcccttccagcactgagaagcacagccaccacacccacagctaccagctttacagccatcccctcctcctccctgggcaccacctggacccgcctatcacagaccaccacacccacggccaccatgtccacagccacaccctcctccactccagagactgcccacacctccacagtgcttaccaccacggccaccacaaccagggccaccggctctgtggccaccccctcttccaccccaggaacagctcacactaccaaagtgccgactaccacaaccacgggcttcacagtcaccccctcctccagcccagggacggcacgcacgcctccagtgtggatcagcacaaccaccacacccacaaccagtggctccacggtgaccccctcctccgtcccggggaccacccacacccccacagtgctgaccaccaccaccacaactgtggccactggttctatggcaacaccctcctctagcacacagaccagtggtactcccccatcactgatcaccacggccactacgatcacggccaccggctccaccaccaacccctcctcaactccagggacaacacctatccccccagtgctgaccaccaccgccaccacacctgcagccaccagcagcacagtgactccctcctctgccctagggaccacccacacacccccagtgccgaacaccacggccaccacacacgggcgatccctgtcccccagcagtccccacacggtgcgcacagcctggacttcggccacctcaggcaccttgggcaccacccacatcacagagccttccacggggacttcccacaccccagcagcaaccaccggtaccacccagcactcgactccagccctgtccagccctcaccctagcagcaggaccaccgagtcacccccttccccagggacgaccaccccgggccacaccacggccacctccaggaccacggccacggccacacccagcaagacccgcacctcgaccctgctgcccagcagccccacatcggcccccataaccacggtggtgaccacgggctgtgagccccagtgtgcctggtcagagtggctggactacagctaccccatgccggggccctctggcggggactttgacacctactccaacatccgtgcggccggaggggccgtctgtgagcagcccctgggcctcgagtgccgtgcccaggcccagcctggtgtccccctgggggagttgggccaggtcgtggaatgcagcctggactttggcctggtctgcaggaaccgtgagcaggtggggaagttcaagatgtgcttcaactatgaaatccgtgtgttctgctgcaactacggccactgccccagcaccccggccaccagctctacggccatgccctcctccactccggggacgacctggatcctcacagagctgaccacaacagccactacgactgcatccactggatccacggccaccccgtcctccaccccgggaacagctccccctcccaaagtgctgaccagcccggccaccacacccacagccaccagttccaaagccacttcctcctccagtccaaggactgcaaccacccttccagtgctgacaagcacagccaccaaatccacagctaccagcgttacacccatcccctcctccacccttgggaccaccgggaccctcccagaacagaccaccacacccgtggccaccatgtccacaatccacccctcctccactccggagaccacccacacctccacagtgctgaccacgaaggccaccacgacaagggccaccagttccacgtccaccccctcctccactccggggacgacctggatcctcacagagctgaccacagcagccactacaactgcagccactggccccacggccaccccgtcctccaccccagggaccacctggatcctcacagagctgaccacaacagccactacgactgcgtccactggatccacggccaccccgtcctccaccccagggaccacctggatcctcacagagccgagcactacagccaccgtgacggtgcccaccggatccacggccaccgcctcctccacccaggcaactgctggcaccccacatgtgagcaccacggccacgacacccacagtcaccagctccaaagccactccctcctccagtccagggactgcaactgcccttccagcactgagaagcacagccaccacacccacagctaccagctttacagccatcccctcctcctccctgggcaccacctggacccgcctatcacagaccaccacacccacggccaccatgtccacagccacaccctcctccactccagagactgtccacacctccacagtgcttaccgccacggccaccacaaccggggccaccggctctgtggccaccccctcctccaccccaggaacagctcacactaccaaagtgccgactaccacaaccacgggcttcacagccaccccctcctccagcccagggacggcactcacgcctccagtgtggatcagcacaaccaccacacccacaaccaccacacccacaaccagtggctccacggtgaccccctcctccatcccggggaccacccacaccgccagagtgctgaccaccaccaccacaactgtggccactggttctatggcaacaccctcctctagcacacagaccagtggtactcccccatcactgaccaccacggccactacgatcacggccaccggctccaccaccaacccctcctcaactccagggacaacacccatcaccccagtgctgaccagcacggccaccacacccgcagccaccagctccaaagccacttcctcctccagtccaaggactgcaaccacccttccagtgctgacaagcacagccacaaaatccacagctaccagctttacacccatcccctcctccaccctgtggaccacgtggaccgtcccagcacagaccaccacacccatgtccaccatgtccacaatccacacctcctctactccagagaccacccacacctccacagtgctgaccaccacagccaccatgacaagggccaccaattccacggccacaccctcctccactctggggacgacccggatcctcactgagctgaccacaacagccactacaactgcagccactggatccacggccaccctgtcctccaccccagggaccacctggatcctcacagagccgagcactatagccaccgtgatggtgcccaccggttccacggccaccgcctcctccactctgggaacagctcacacccccaaagtggtgaccaccatggccactatgcccacagccactgcctccacggttcccagctcgtccaccgtggggaccacccgcacccctgcagtgctccccagcagcctgccaaccttcagcgtgtccactgtgtcctcctcagtcctcaccaccctgagacccactggcttccccagctcccacttctctactccctgcttctgcagggcatttggacagtttttctcgcccggggaagtcatctacaataagaccgaccgagccggctgccatttctacgcagtgtgcaatcagcactgtgacattgaccgcttccagggcgcctgtcccacctccccaccgccagtgtcctccgccccgctgtcctcgccctcccctgcccctggctgtgacaatgccatccctctccggcaggtgaatgagacctggaccctggagaactgcacggtggccaggtgcgtgggtgacaaccgtgtcgtcctgctggacccaaagcctgtggccaacgtcacctgcgtgaacaagcacctgcccatcaaagtgtcggacccgagccagccctgtgacttccactatgagtgcgagtgcatctgcagcatgtggggcggctcccactattccacctttgacggcacctcttacaccttccggggcaactgcacctatgtcctcatgagagagatccatgcacgctttgggaatctcagcctctacctggacaaccactactgcacggcctctgccactgccgctgccgcccgctgcccccgcgccctcagcatccactacaagtccatggatatcgtcctcactgtcaccatggtgcatgggaaggaggagggcctgatcctgtttgaccaaattccggtgagcagcggtttcagcaagaacggcgtgcttgtgtctgtgctggggaccaccaccatgcgtgtggacattcctgccctgggcgtgagcgtcaccttcaatggccaagtcttccaggcccggctgccctacagcctcttccacaacaacaccgagggccagtgcggcacctgcaccaacaaccagagggacgactgtctccagcgggacggaaccactgccgccagttgcaaggacatggccaagacgtggctggtccccgacagcagaaaggatggctgctgggccccgactggcacaccccccactgccagccccgcagccccggtgtctagcacacccacccccaccccatgcccaccacagccgctctgtgatctgatgctgagccaggtctttgctgagtgccacaaccttgtgcccccgggcccattcttcaacgcctgcatcagcgaccactgcaggggccgccttgaggtgccctgccagagcctggaggcttacgcagagctctgccgcgcccggggagtgtgcagtgactggcgaggtgcaaccggtggcctgtgcgacctcacctgcccacccaccaaagtgtacaagccatgcggccccatacagcctgccacctgcaactctaggaaccagagcccacagctggaggggatggcggagggctgcttctgccctgaggaccagatcctcttcaacgcacacatgggcatctgcgtgcaggcctgcccctgcgtgggacccgatgggtttcctaaatttcccggggagcggtgggtcagcaactgccagtcctgcgtgtgtgacgagggttcagtgtcggtgcagtgcaagcccctgccctgtgacgcccagggtcagcccccgccgtgcaaccgtcccggcttcgtaaccgtgaccaggccccgggccgagaacccctgctgccccgagacggtgtgcgtgtgcaacacaaccacctgcccccagagcctgcctgtgtgcccgccagggcaggagtccatctgcacccaggaggagggcgactgctgtcccaccttccgctgcagacctcagctgtgttcgtacaatggcaccttctacggggttggtgcaaccttcccaggcgcccttccctgccacatgtgtacctgcctctctggggacacccaggacccaacggtgcaatgtcaggaggatgcctgcaacaatactacctgtccccagggctttgagtacaagagagtggccgggcagtgctgtggggagtgcgtccagaccgcctgcctcacgcccgatggccagccagtccagctgaatgaaacctgggtcaacagccatgtggacaactgcaccgtgtacctctgtgaggctgagggtggagtccatttgctgaccccacagcctgcatcctgcccagatgtgtccagctgcagggggagcctcaggaaaaccggctgctgctactcctgtgaggaggactcctgtcaagtccgcatcaacacgaccatcctgtggcaccagggctgcgagaccgaggtcaacatcaccttctgcgagggctcctgccccggagcgtccaagtactcagcagaggcccaggccatgcagcaccagtgcacctgctgccaggagaggcgggtccacgaggagacggtgcccttgcactgtcctaacggctcagccatcctgcacacctacacccacgtggatgagtgtggctgcacgcccttctgtgtccctgcgcccatggctcccccacacacccgtggcttcccggcccaggaggccactgctgtctgagaacgttctgcctccatccccatgctctgtccacctggagccaggatgtgcattgtctgatcatgaaaaccttgggcctcctctgcggagccccccggcctgtgtgtggcaccccgcgctccgtgctcctgctgcccaccccgtgggtgaaaccggccccagaagggtgaggggccagcaggacccctttcgggagggcgccactcaggagtcctaccctgggagagcctgtggcccaccttggccttgcccctccctgatgtcactgggacgccctggaacaaactaagcatgtgcgggcctatgtgtccctgccacggccggagcgcccgcgcagcacggattccagctggccacgtccggccgctggggcagacaggctggtccaggcaaggccagctgctgccaggaagctgcgacaggcaaggcggccgcctgtccatgcctgctgcagggtaactcagggctgaggtcgcaacggccaggtcagagaggggtcagcatcccaaagccccctctgctcaacccagcccagttttgcaaataaaccctgagcattgagta

SEQ ID NO: 97 - DNA, 2776 bp, Homo sapiens
gcactccagcactgcgcagggaccgccttggaccgcagttgccggccaggaatcccagtgtcacggtggacacgcctccctcgcgcccttgccgcccacctgctcacccagctcaggggctttggaattctgtggccacactgcgaggagatcggttctgggtcggaggctacaggaagactcccactccctgaaatctggagtgaagaacgccgccatccagccaccattccaaggaggtgcaggagaacagctctgtgataccatttaacttgttgacattacttttatttgaaggaacgtatattagagcttactttgcaaagaaggaagatggttgtttccgaagtggacatcgcaaaagctgatccagctgctgcatcccaccctctattactgaatggagatgctactgtggcccagaaaaatccaggctcggtggctgagaacaacctgtgcagccagtatgaggagaaggtgcgcccctgcatcgacctcattgactccctgcgggctctaggtgtggagcaggacctggccctgccagccatcgccgtcatcggggaccagagctcgggcaagagctccgtgttggaggcactgtcaggagttgcccttcccagaggcagcgggatcgtgaccagatgcccgctggtgctgaaactgaagaaacttgtgaacgaagataagtggagaggcaaggtcagttaccaggactacgagattgagatttcggatgcttcagaggtagaaaaggaaattaataaagcccagaatgccatcgccggggaaggaatgggaatcagtcatgagctaatcaccctggagatcagctcccgagatgtcccggatctgactctaatagaccttcctggcataaccagagtggctgtgggcaatcagcctgctgacattgggtataagatcaagacactcatcaagaagtacatccagaggcaggagacaatcagcctggtggtggtccccagtaatgtggacatcgccaccacagaggctctcagcatggcccaggaggtggaccccgagggagacaggaccatcggaatcttgacgaagcctgatctggtggacaaaggaactgaagacaaggttgtggacgtggtgcggaacctcgtgttccacctgaagaagggttacatgattgtcaagtgccggggccagcaggagatccaggaccagctgagcctgtccgaagccctgcagagagagaagatcttctttgagaaccacccatatttcagggatctgctggaggaaggaaaggccacggttccctgcctggcagaaaaacttaccagcgagctcatcacacatatctgtaaatctctgcccctgttagaaaatcaaatcaaggagactcaccagagaataacagaggagctacaaaagtatggtgtcgacataccggaagacgaaaatgaaaaaatgttcttcctgatagataaagttaatgcctttaatcaggacatcactgctctcatgcaaggagaggaaactgtaggggaggaagacattcggctgtttaccagactccgacacgagttccacaaatggagtacaataattgaaaacaattttcaagaaggccataaaattttgagtagaaaaatccagaaatttgaaaatcagtatcgtggtagagagctgccaggctttgtgaattacaggacatttgagacaatcgtgaaacagcaaatcaaggcactggaagagccggctgtggatatgctacacaccgtgacggatatggtccggcttgctttcacagatgtttcgataaaaaattttgaagagttttttaacctccacagaaccgccaagtccaaaattgaagacattagagcagaacaagagagagaaggtgagaagctgatccgcctccacttccagatggaacagattgtctactgccaggaccaggtatacaggggtgcattgcagaaggtcagagagaaggagctggaagaagaaaagaagaagaaatcctgggattttggggctttccagtccagctcggcaacagactcttccatggaggagatctttcagcacctgatggcctatcaccaggaggccagcaagcgcatctccagccacatccctttgatcatccagttcttcatgctccagacgtacggccagcagcttcagaaggccatgctgcagctcctgcaggacaaggacacctacagctggctcctgaaggagcggagcgacaccagcgacaagcggaagttcctgaaggagcggcttgcacggctgacgcaggctcggcgccggcttgcccagttccccggttaaccacactctgtccagccccgtagacgtgcacgcacactgtctgcccccgttcccgggtagccactggactgacgacttgagtgctcagtagtcagactggatagtccgtctctgcttatccgttagccgtggtgatttagcaggaagctgtgagagcagtttggtttctagcatgaagacagagccccaccctcagatgcacatgagctggcgggattgaaggatgctgtcttcgtactgggaaagggattttcagccctcagaatcgctccaccttgcagctctccccttctctgtattcctagaaactgacacatgctgaacatcacagcttatttcctcatttttataatgtcccttcacaaacccagtgttttaggagcatgagtgccgtgtgtgtgcgtcctgtcggagccctgtctcctctctctgtaataaactcatttctagcaga

SEQ ID NO: 98 - DNA, 3408 bp, Homo sapiens
gatgatttctccatcctgaacgtgcagcgagcttgtcaggaagatcggaggtgccaagtagcagagaaagcatcccccagctctgacagggagacagcacatgtctaaggcccacaagccttggccctaccggaggagaagtcaattttcttctcgaaaatacctgaaaaaagaaatgaattccttccagcaacagccaccgccattcggcacagtgccaccacaaatgatgtttcctccaaactggcagggggcagagaaggacgctgctttcctcgccaaggacttcaactttctcactttgaacaatcagccaccaccaggaaacaggagccaaccaagggcaatggggcccgagaacaacctgtacagccagtacgagcagaaggtgcgcccctgcattgacctcatcgactccctgcgggctctgggtgtggagcaggacctggccctgccagccatcgccgtcatcggggaccagagctcgggcaagagctctgtgctggaggcactgtcaggagtcgcgcttcccagaggcagcggaatcgtaaccaggtgtccgctggtgctgaaactgaaaaagcagccctgtgaggcatgggccggaaggatcagctaccggaacaccgagctagagcttcaggaccctggccaggtggagaaagagatacacaaagcccagaacgtcatggccgggaatggccggggcatcagccatgagctcatcagcctggagatcacctcccctgaggttccagacctgaccatcattgaccttcccggcatcaccagggtggctgtggacaaccagccccgagacatcggactgcagatcaaggctctcatcaagaagtacatccagaggcagcagacgatcaacttggtggtggttccctgtaacgtggacattgccaccacggaggcgctgagcatggcccatgaggtggacccggaaggggacaggaccatcggtatcctgaccaaaccagatctaatggacaggggcactgagaaaagcgtcatgaatgtggtgcggaacctcacgtaccccctcaagaagggctacatgattgtgaagtgccggggccagcaggagatcacaaacaggctgagcttggcagaggcaaccaagaaagaaattacattctttcaaacacatccatatttcagagttctcctggaggaggggtcagccacggttccccgactggcagaaagacttaccactgaactcatcatgcatatccaaaaatcgctcccgttgttagaaggacaaataagggagagccaccagaaggcgaccgaggagctgcggcgttgcggggctgacatccccagccaggaggccgacaagatgttctttctaattgagaaaatcaagatgtttaatcaggacatcgaaaagttagtagaaggagaagaagttgtaagggagaatgagacccgtttatacaacaaaatcagagaggattttaaaaactgggtaggcatacttgcaactaatacccaaaaagttaaaaatattatccacgaagaagttgaaaaatatgaaaagcagtatcgaggcaaggagcttctgggatttgtcaactacaagacatttgagatcatcgtgcatcagtacatccagcagctggtggagcccgcccttagcatgctccagaaagccatggaaattatccagcaagctttcattaacgtggccaaaaaacattttggcgaatttttcaaccttaaccaaactgttcagagcacgattgaagacataaaagtgaaacacacagcaaaggcagaaaacatgatccaacttcagttcagaatggagcagatggttttttgtcaagatcagatttacagtgttgttctgaagaaagtccgagaagagatttttaaccctctggggacgccttcacagaatatgaagttgaactctcattttcccagtaatgagtcttcggtttcctcctttactgaaataggcatccacctgaatgcctacttcttggaaaccagcaaacgtctcgccaaccagatcccatttataattcagtattttatgctccgagagaatggtgactccttgcagaaagccatgatgcagatactacaggaaaaaaatcgctattcctggctgcttcaagagcagagtgagaccgctaccaagagaagaatccttaaggagagaatttaccggctcactcaggcgcgacacgcactctgtcaattctccagcaaagagatccactgaagggcggcgatgcctgtggttgttttcttgtgcgtactcattcattctaaggggagtcggtgcaggatgccgcttctgctttggggccaaactcttctgtcactatcagtgtccatctctactgtactccctcagcatcagagcatgcatcaggggtccacacaggctcagctctctccaccacccagctcttccctgaccttcacgaagggatggctctccagtccttgggtcccgtagcacacagttacagtgtcctaagatactgctatcattcttcgctaatttgtatttgtattcccttccccctacaagattatgagaccccagagggggaaggtctgggtcaaattcttcttttgtatgtccagtctcctgcacagcacctgcagcattgtaactgcttaataaatgacatctcactgaacgaatgagtgctgtgtaagtgatggagatacctgaggctattgctcaagcccaggccttggacatttagtgactgttagccggtccctttcagatccagtggccatgccccctgcttcccatggttcactgtcattgtgtttcccagcctctccactcccccgccagaaaggagcctgagtgattctcttttcttcttgtttccctgattatgatgagcttccattgttctgttaagtcttgaagaggaatttaataaagcaaagaaactttttaaaaacgtagccaggttcagtgactcatacctgtaatcccagtgactctggagactgaagcagaaggatcacttgagcccaggagttcaagaccagactgggcaacacagggagaccctgtctctaaaaaaatttgtttgtaagtagccagacatggtggtgcacacctgtagtcccagccactcaggtggctggagcaggaggatcccttgagcccaggattttgaggctgcagtgagccatgactgcaccatgtactacagcctgggtgacagagtgagagtgagactctgtctctgaatacacacacacacacacacacacatacacagagagagagagagagaacttcacaccagtgatcatcattatgggtaattttcttttcttcttcatgttttcctgtatgtttcaaatgatgaacatatagattccttaataaaaaggcaatagaataaa

SEQ ID NO: 99 - DNA, 2667 bp, Homo sapiens
aatgcgacccgaccgcgctgaggctccaggaccgcccgccatggctgcaggaggtcccggcgcggggtctgcggccccggtctcctccacatcctcccttcccctggctgctctcaacatgcgagtgcggcgccgcctgtctctgttcttgaacgtgcggacacaggtggcggccgactggaccgcgctggcggaggagatggactttgagtacttggagatccggcaactggagacacaagcggaccccactggcaggctgctggacgcctggcagggacgccctggcgcctctgtaggccgactgctcgagctgcttaccaagctgggccgcgacgacgtgctgctggagctgggacccagcattgaggaggattgccaaaagtatatcttgaagcagcagcaggaggaggctgagaagcctttacaggtggccgctgtagacagcagtgtcccacggacagcagagctggcgggcatcaccacacttgatgaccccctggggcatatgcctgagcgtttcgatgccttcatctgctattgccccagcgacatccagtttgtgcaggagatgatccggcaactggaacagacaaactatcgactgaagttgtgtgtgtctgaccgcgatgtcctgcctggcacctgtgtctggtctattgctagtgagctcatcgaaaagaggtgccgccggatggtggtggttgtctctgatgattacctgcagagcaaggaatgtgacttccagaccaaatttgcactcagcctctctccaggtgcccatcagaagcgactgatccccatcaagtacaaggcaatgaagaaagagttccccagcatcctgaggttcatcactgtctgcgactacaccaacccctgcaccaaatcttggttctggactcgccttgccaaggccttgtccctgccctgaagactgttctgaggccctgggtgtgtgtgtatctgtctgcctgtccatgtacttctgccctgcctcctcctttcgttgtaggaggaatctgtgctctacttacctctcaattcctggagatgccaacttcacagacacgtctgcagcagctggacatcacatttcatgtcctgcatggaaccagtggctgtgagtggcatgtccacttgctggattatcagccaggacactatagaacaggaccagctgagactaagaaggaccagcagagccagctcagctctgagccattcacacatcttcaccctcagtttcctcacttgaggagtgggatggggagaacagagagtagctgtgtttgaatccctgtaggaaatggtgaagcatagctctgggtctcctgggggagaccaggcttggctgcgggagagctggctgttgctggactacatgctggccactgctgtgaccacgacactgctggggcagcttcttccacagtgatgcctactgatgcttcagtgcctctgcacaccgcccattccacttcctccttccccacagggcaggtggggaagcagtttggcccagcccaaggagaccccaccttgagccttatttcctaatgggtccacctctcatctgcatctttcacacctcccagcttctgcccaaccttcagcagtgacaagtccccaagagactcgcctgagcagcttgggctgcttttcatttccacctgtcaggatgcctgtggtcatgctctcagctccacctggcatgagaagggatcctggcctctggcatattcatcaagtatgagttctggggatgagtcactgtaatgatgtgagcagggagccttcctccctgggccacctgcagagagctttcccaccaactttgtaccttgattgccttacaaagttatttgtttacaaacagcgaccatataaaagcctcctgccccaaagcttgtgggcacatgggcacatacagactcacatacagacacacacatatatgtacagacatgtactctcacacacacaggcaccagcatacacacgtttttctaggtacagctcccaggaacagctaggtgggaaagtcccatcactgagggagcctaaccatgtccctgaacaaaaattgggcactcatctattccttttctcttgtgtccctactcattgaaaccaaactctggaaaggacccaatgtaccagtatttatacctctaatgaagcacagagagaggaagagagctgcttaaactcacacaacaatgaactgcagacacagctgttctctccctctctccttcccagagcaatttatactttaccctcaggctgtcctctggggagaaggtgccatggtcttaggtgtctgtgccccaggacagaccctaggaccctaaatccaatagaaaatgcatatctttgctccactttcagccaggctggagcaaggtaccttttcttaggatcttgggagggaatggatgcccctctctgcatgatcttgttgaggcatttagctgccatgcacctgtccccctttaatactgggcattttaaagccatctcaagaggcatcttctacatgttttgtacgcattaaaataatttcaaagatatctgagaaaagccgatatttgccattcttcctatatcctggaatatatcttgcatcctgagtttataataataaataatattctaccttggaaa

SEQ ID NO: 100 - DNA, 3408 bp, Homo sapiens
agagcgagccgagccgcggccagctccggcgggcagggggggcgctggagcgcagcgcagcgcagccccatcagtccgcaaagcggaccgagctggaagtcgagcgctgccgcgggaggcgggcgatgggggcaggtgccaccggccgcgccatggacgggccgcgcctgctgctgttgctgcttctgggggtgtcccttggaggtgccaaggaggcatgccccacaggcctgtacacacacagcggtgagtgctgcaaagcctgcaacctgggcgagggtgtggcccagccttgtggagccaaccagaccgtgtgtgagccctgcctggacagcgtgacgttctccgacgtggtgagcgcgaccgagccgtgcaagccgtgcaccgagtgcgtggggctccagagcatgtcggcgccgtgcgtggaggccgacgacgccgtgtgccgctgcgcctacggctactaccaggatgagacgactgggcgctgcgaggcgtgccgcgtgtgcgaggcgggctcgggcctcgtgttctcctgccaggacaagcagaacaccgtgtgcgaggagtgccccgacggcacgtattccgacgaggccaaccacgtggacccgtgcctgccctgcaccgtgtgcgaggacaccgagcgccagctccgcgagtgcacacgctgggccgacgccgagtgcgaggagatccctggccgttggattacacggtccacacccccagagggctcggacagcacagcccccagcacccaggagcctgaggcacctccagaacaagacctcatagccagcacggtggcaggtgtggtgaccacagtgatgggcagctcccagcccgtggtgacccgaggcaccaccgacaacctcatccctgtctattgctccatcctggctgctgtggttgtgggccttgtggcctacatagccttcaagaggtggaacagctgcaagcagaacaagcaaggagccaacagccggccagtgaaccagacgcccccaccagagggagaaaaactccacagcgacagtggcatctccgtggacagccagagcctgcatgaccagcagccccacacgcagacagcctcgggccaggccctcaagggtgacggaggcctctacagcagcctgcccccagccaagcgggaggaggtggagaagcttctcaacggctctgcgggggacacctggcggcacctggcgggcgagctgggctaccagcccgagcacatagactcctttacccatgaggcctgccccgttcgcgccctgcttgcaagctgggccacccaggacagcgccacactggacgccctcctggccgccctgcgccgcatccagcgagccgacctcgtggagagtctgtgcagtgagtccactgccacatccccggtgtgagcccaaccggggagcccccgccccgccccacattccgacaaccgatgctccagccaacccctgtggagcccgcacccccaccctttggggggggcccgcctggcagaactgagctcctctgggcaggacctcagagtccaggccccaaaaccacagccctgtcagtgcagcccgtgtggccccttcacttctgaccacacttcctgtccagagagagaagtgcccctgctgcctccccaaccctgcccctgccccgtcaccatctcaggccacctgcccccttctcccacactgctaggtgggccagcccctcccaccacagcaggtgtcatatatggggggccaacaccagggatggtactagggggaagtgacaaggccccagagactcagagggaggaatcgaggaaccagagccatggactctacactgtgaacttggggaacaagggtggcatcccagtggcctcaaccctccctcagcccctcttgccccccaccccagcctaagatgaagaggatcggaggcttgtcagagctgggaggggttttcgaagctcagcccacccccctcattttggatataggtcagtgaggcccagggagaggccatgattcgcccaaagccagacagcaacggggaggccaagtgcaggctggcaccgccttctctaaatgaggggcctcaggtttgcctgagggcgaggggagggtggcaggtgaccttctgggaaatggcttgaagccaagtcagctttgccttccacgctgtctccagacccccaccccttccccactgcctgcccacccgtggagatgggatgcttgcctagggcctggtccatgatggagtcaggtttggggttcgtggaaagggtgctgcttccctctgcctgtccctctcaggcatgcctgtgtgacatcagtggcatggctccagtctgctgccctccatcccgacatggacccggagctaacactggcccctagaatcagcctaggggtcagggaccaaggacccctcaccttgcaacacacagacacacgcacacacacacacaggaggagaaatctcacttttctccatgagttttttctcttgggctgagactggatactgcccggggcagctgccagagaagcatcggagggaattgaggtctgctcggccgtcttcactcgcccccgggtttggcgggccaaggactgccgaccgaggctggagctggcgtctgtcttcaagggcttacacgtggaggaatgctcccccatcctccccttccctgcaaacatggggttggctgggcccagaaggttgtgatgaagaaaagtgggccagtgtgggaatgcggcaagaaggaattgacttcgactgtgacctgtggggatttctcccagctctagacaaccctgcaaaggactgttttttcctgagcttggccagaagggggccatgaggcctcagtggactttccaccccctccctggcctgttctgttttgcctgaagttggagtgagtgtggctcccctctatttagcatgacaagccccaggcaggctgtgcgctgacaaccaccgctccccagcccagggttcccccagccctgtggaagggactaggagcactgtagtaaatggcaattctttgacctcaacctgtgatgaggggaggaaactcacctgctggcccctcacctgggcacctggggagtgggacagagtctgggtgtatttattttcctccccagcaggtggggagggggtttgggggcttgcaagtatgttttagcatgtgtttggttctggggcccctttttactccccttgagctgagatggaacccttttggcccccgagctgggggccatgagctccagacccccagcaaccctcctatcacctcccctccttgcctcctgtgtaatcatttcttgggccctcctgaaacttacacacaaaacgttaagtgatgaacattaaatagcaaagaaagaaaaa

SEQ ID NO: 101 - DNA, 1627 bp, Homo sapiens
gcatttccagagcagagttcagagaaaggctgggctgcttgttgctggctaaaggacaaagggtaagtttcaggaagcagaagagtgagcagatgaaattcagcactgggatcaggggagtgtctgatttgcaaaaggaaagtgcaaagacagctcctcccttctgaggaaacgaaaccaacagcagtccaagctcagtcagcagaagagataaaagcaaacaggtctgggaggcagttctgttgccactctctctcctgtcaatgatggatctcagaaataccccagccaaatctctggacaagttcattgaagactatctcttgccagacacgtgtttccgcatgcaaatcaaccatgccattgacatcatctgtgggttcctgaaggaaaggtgcttccgaggtagctcctaccctgtgtgtgtgtccaaggtggtaaagggtggctcctcaggcaagggcaccaccctcagaggccgatctgacgctgacctggttgtcttcctcagtcctctcaccacttttcaggatcagttaaatcgccggggagagttcatccaggaaattaggagacagctggaagcctgtcaaagagagagagcattttccgtgaagtttgaggtccaggctccacgctggggcaacccccgtgcgctcagcttcgtactgagttcgctccagctcggggagggggtggagttcgatgtgctgcctgcctttgatgccctgggtcagttgactggcggctataaacctaacccccaaatctatgtcaagctcatcgaggagtgcaccgacctgcagaaagagggcgagttctccacctgcttcacagaactacagagagacttcctgaagcagcgccccaccaagctcaagagcctcatccgcctagtcaagcactggtaccaaaattgtaagaagaagcttgggaagctgccacctcagtatgccctggagctcctgacggtctatgcttgggagcgagggagcatgaaaacacatttcaacacagcccagggatttcggacggtcttggaattagtcataaactaccagcaactctgcatctactggacaaagtattatgactttaaaaaccccattattgaaaagtacctgagaaggcagctcacgaaacccaggcctgtgatcctggacccggcggaccctacaggaaacttgggtggtggagacccaaagggttggaggcagctggcacaagaggctgaggcctggctgaattacccatgctttaagaattgggatgggtccccagtgagctcctggattctgctggtgagacctcctgcttcctccctgccattcatccctgcccctctccatgaagcttgagacatatagctggagaccattctttccaaagaacttacctcttgccaaaggccatttatattcatatagtgacaggctgtgctccatattttacagtcattttggtcacaatcgagggtttctggaattttcacatcccttgtccagaattcattcccctaagagtaataataaataatctctaacaccatttattgactgtctgcttcgggctcaggttctgtcctaagccctttaatatgcactctctcattaaatagtcacaacaa

SEQ ID NO: 102 - DNA, 4622 bp, Homo sapiens
agtttcagtttcctggctctgggcagcagcaagaattcctctgcctcccatcctaccattcactgtcttgccggcagccagctgagagcaatgggaaatggggagtcccagctgtcctcggtgcctgctcagaagctgggttggtttatccaggaatacctgaagccctacgaagaatgtcagacactgatcgacgagatggtgaacaccatctgtgacgtcctgcaggaacccgaacagttccccctggtgcagggagtggccataggtggctcctatggacggaaaacagtcttaagaggcaactccgatggtacccttgtcctcttcttcagtgacttaaaacaattccaggatcagaagagaagccaacgtgacatcctcgataaaactggggataagctgaagttctgtctgttcacgaagtggttgaaaaacaatttcgagatccagaagtcccttgatgggttcaccatccaggtgttcacaaaaaatcagagaatctctttcgaggtgctggccgccttcaacgctctgagcttaaatgataatcccagcccctggatctatcgagagctcaaaagatccttggataagacaaatgccagtcctggtgagtttgcagtctgcttcactgaactccagcagaagttttttgacaaccgtcctggaaaactaaaggatttgatcctcttgataaagcactggcatcaacagtgccagaaaaaaatcaaggatttaccctcgctgtctccgtatgccctggagctgcttacggtgtatgcctgggaacaggggtgcagaaaagacaactttgacattgctgaaggcgtcagaaccgtactggagctgatcaaatgccaggagaagctgtgtatctattggatggtcaactacaactttgaagatgagaccatcaggaacatcctgctgcaccagctccaatcagcgaggccagtaatcttggatccagttgacccaaccaataatgtgagtggagataaaatatgctggcaatggctgaaaaaagaagctcaaacctggttgacttctcccaacctggataatgagttacctgcaccatcttggaatgttctgcctgcaccactcttcacgaccccaggccaccttctggataagttcatcaaggagtttctccagcccaacaaatgcttcctagagcagattgacagtgctgttaacatcatccgtacattccttaaagaaaactgcttccgacaatcaacagccaagatccagattgtccggggaggatcaaccgccaaaggcacagctctgaagactggctctgatgccgatctcgtcgtgttccataactcacttaaaagctacacctcccaaaaaaacgagcggcacaaaatcgtcaaggaaatccatgaacagctgaaagccttttggagggagaaggaggaggagcttgaagtcagctttgagcctcccaagtggaaggctcccagggtgctgagcttctctctgaaatccaaagtcctcaacgaaagtgtcagctttgatgtgcttcctgcctttaatgcactgggtcagctgagttctggctccacacccagccccgaggtttatgcagggctcattgatctgtataaatcctcggacctcccgggaggagagttttctacctgtttcacagtcctgcagcgaaacttcattcgctcccggcccaccaaactaaaggatttaattcgcctggtgaagcactggtacaaagagtgtgaaaggaaactgaagccaaaggggtctttgcccccaaagtatgccttggagctgctcaccatctatgcctgggagcaggggagtggagtgccggattttgacactgcagaaggtttccggacagtcctggagctggtcacacaatatcagcagctctgcatcttctggaaggtcaattacaactttgaagatgagaccgtgaggaagtttctactgagccagttgcagaaaaccaggcctgtgatcttggacccagccgaacccacaggtgacgtgggtggaggggaccgttggtgttggcatcttctggcaaaagaagcaaaggaatggttatcctctccctgcttcaaggatgggactggaaacccaataccaccttggaaagtgccggtaaaagtcatctaaaggaggcgttgtctggaaatagccctgtaacaggcttgaatcaaagaacttctcctactgtagcaacctgaaattaactcagacacaaataaaggaaacccagctcacaggagcttaaacagctggtcagccccctaagcccccactacaagtgatcctcaggcaggtaaccccagattcatgcactgtagggtgctgcgcagcatccctagtctctacccagtagatgccactagccctcctctcccagtgacaaccaaaagtcttcagacattgtcaaacgttcccctgggttcacagatctttctgcctttggcttttggctccaccctctttagctgttaatttgagtacttatggccctgaaagcggccacggtgcctccagatggcaggtttgcaatccaagcaggaagaaggaaaagatacccaaaggtcaagaacacagtgattttattagaagtttcatccgcaaattttcttccatttcattgctcagaaatgtcatgtggctacctgtaacttgaaggtggctacaaagatgactgtggacgtgggttgcactggccacccaaggatgtctgccacacctctccaaagccctccctacctaccaagatatacctgatatattccaccaggatatcctccctccagatatacttggttctctccaccaggttctttctttaaagcaggatttctcaactttgatacttactcacatttggggctagacagttctttgtttggaggctctcttgtgcattgtaggatgttgagcagcatctctggcctgtacccagtagatgccacccagttgtgacaattaaaagtgtcttgagactttatcatgtgtcttctgccctaggtgagaacccttgcactagaggaaccctacaccccaaccctggggggaatgtagggaagaggtggccaagccaaccgtggggttagctctaattattaagatatgcattataaataaataccaaaaaattgtctctggcaatagttaccttcccagatacaggtccccccttttttcccctaactcttttaagcaatgattgtaactattaggagacattgctctcccacgtatgtttttctttttagacaatgcagacaccaggaagttgtggagctaggatccatcctattgtcaatgagatgttctcatccagaagccatagaatcctgaataataattctaaaagaaacttctagagatcatctggcaatcgcttttaaagactcggctcaccgtgagaaagagtcactcacatccattcttcccttgatggtccctattcctccttcccttgcttcttggacttcttgaaatcaatcaagactgcaaaccctttcataaagtcttgccttgctgaactccctctctgcaggcagcctgcctttaaaaatagttgctgtcatccactttatgtgcatcttatttctgtcaacttgtattttttttcttgtatttttccaattagctcctcctttttccttccagtctaaaaaaggaatcctctgtgtcttcaaagcaaagctctttactttccccttggttctcataactctgtgatcttgctctcggtgcttccaactcatccacgtcctgtctgtttcctctgtatacaaaaccctttctgcccctgctgacacagacatcctctatgccagcagccagccaaccctttcattagaacttcaagctctccaaaggctcagattataactgttgtcatatttatatgaggctgttgtcttttccttctgagcctgcctttctcccccccacccaggagtatcctcttgccaaatcaaaagactttttccttgggctttagccttaaagatacttgaaggtctaggtgctttaacctcacataccctcacttaaacttttatcactgttgcatataccagttgtgatacaataaagaatgtatctggattttgtgcctagttcctagcacacagcttcaaaaattctagagtttcctgataggagtgtcttttgtattcataacaagcccttttcacccatgcctgggtttatgctaacaaggttacccatggtgggcccttagtttcaaggaaggagttggccaagccagaaagaccaagcatgtggttaaagcattggaattttcagccccatcccacccccaatctccaaggaggtgatggggctggaaattgagttcaattttaacatggccagtgatttaagcaatgctgcctatgtaaagaaaccccaataaaaactctggacagtgaggcttggggagcttcctgattggcagacattccaatgtactaggaaggtagcgcatcttgattccacagggacaaaggctcctgagctctgggcccttccagtgcttgccaccctacatactctttgtctggctcttcatttgtattctttataataaaatggtgattgtaagtagagca

SEQ ID NO: 103 - DNA, 4193 bp, Homo sapiens
attcgggtggagctgagccggagacaggcagttgtgaaaaacttcaggacaaaaatgtttcatttaaggacttgtgctgctaagttgaggccattgacggcttcccagactgttaagacattttcacaaaacagaccagcagcagctaggacatttcaacagattcggtgctattctgcacctgttgctgctgagccctttctcagtgggactagttcgaactatgtggaggagatgtactgtgcttggctggaaaaccccaaaagtgtacataagtcatgggacattttttttcgcaacacgaatgccggagccccaccgggcactgcctaccagagtccccttcccctgagccgaggctccctggctgctgtggcccatgcacagtccctggtagaagcacagcccaacgtggacaagctcgtggaggaccacctggcagtgcagtcgctcatcagggcatatcagatacgagggcaccatgtagcacagctggaccccctggggattttggatgctgatctggactcctccgtgcccgctgacattatctcatccacagacaaacttgggttctatggcctggatgagtctgacctcgacaaggtcttccacttgcccaccaccactttcatcgggggacaggaatcagcacttcctctgcgggagatcatccgtcggctggagatggcctactgccagcatattggggtggagttcatgttcatcaatgacctggagcagtgccagtggatccggcagaagtttgagacccctgggatcatgcagttcacaaatgaggagaaacggaccctgctggccaggcttgtgcggtccaccaggtttgaggagttcctacagcggaagtggtcctctgagaagcgctttggtctagaaggctgcgaggtactgatccctgccctcaagaccatcattgacaagtctagtgagaatggcgtggactacgtgatcatgggcatgccacacagagggcggctgaacgtgcttgcaaatgtcatcaggaaggagctggaacagatcttctgtcaattcgattcaaagctggaggcagctgatgagggctccggagatgtgaagtaccacctgggcatgtatcaccgcaggatcaatcgtgtcaccgacaggaacattaccttgtccttggtggccaacccttcccaccttgaggccgctgaccccgtggtgatgggcaagaccaaagccgaacagttttactgtggcgacactgaagggaaaaaggtcatgtccatcctgttgcatggggatgctgcatttgctggccagggcattgtgtacgagaccttccacctcagcgacctgccatcctacacaactcatggcaccgtgcacgtggtcgtcaacaaccagatcggcttcaccaccgaccctcggatggcccgctcctccccctaccccactgacgtggcccgagtggtgaatgcccccattttccacgtgaactcagatgaccccgaggctgtcatgtacgtgtgcaaagtggcggccgagtggaggagcaccttccacaaggacgtggttgtcgatttggtgtgttaccggcgcaacggccacaacgagatggatgagcccatgttcacgcagccgctcatgtacaagcagatccgcaagcagaagcctgtgttacagaagtacgctgagctgctggtgtcgcagggtgtggtcaaccagcctgagtatgaggaggaaatttccaagtatgataagatctgtgaggaagcttttgccagatctaaagatgagaagatcttgcacattaagcactggctggactctccctggcctggcttcttcaccctggacgggcagcccaggagcatgtcctgcccctccacgggtctgacggaggatattctgacacacatcgggaatgtggctagttctgtgcctgtggaaaactttactattcatggagggctgagccggatcttgaagactcgtggggaaatggtgaagaaccggactgtggactgggctctagcggagtacatggcgtttggctcgctcctgaaggagggcatccacattcggctgagcggccaggacgtggagcggggcacattcagccaccgccaccatgtgctccatgaccagaatgtggacaagagaacctgcatccccatgaaccatctctggcccaatcaggccccctatactgtgtgcaacagctcactgtctgagtacggcgtgctgggctttgagctgggcttcgccatggccagtcctaatgccctggtcctctgggaagcccaatttggtgacttccacaacacggcccagtgtatcatcgaccagttcatctgcccgggacaagccaagtgggtgcggcagaatggcatcgtgttgctgctgccccatggcatggagggcatgggtccagaacattcctccgcccgcccagagcggttcttgcagatgtgcaacgatgacccagatgtcctgccagaccttaaagaagccaacttcgacatcaatcagctatatgactgcaattgggttgttgtcaactgctccactcctggcaacttcttccacgtgctacgacgccagatcctgctgccattccggaagccgttaattatcttcacccccaaatccctgttgcgccaccccgaggccagatccagctttgatgagatgcttccaggaacccacttccagcgggtgatcccagaagatggccctgcagctcagaacccagaaaatgtcaaaaggcttctcttctgcaccggcaaagtgtattatgacctcacccgggagcgcaaagcacgcgacatggtggggcaggtggccatcacaaggattgagcagctgtcgccattcccctttgacctcctgctgaaggaggtgcagaagtaccccaatgctgagctggcctggtgccaggaggagcacaagaaccaaggctactatgactacgtgaagccaagacttcggaccaccatcagccgcgccaagcccgtctggtatgccggccgggacccagcggctgctccagccaccggcaacaagaagacccacctgacggagctgcagcgcctcctggacacggccttcgacctggacgtcttcaagaacttctcgtagatgctgcctagggttgcttgggccactgccctctccacacccatgactgccccttgcttctcaactaaagaatagtgcctcagcgctgcccacaccaccgccctcctcgctgtgccaccacccctccctctgctctcataggagttaggctgtcgtccccctccagtgcttggctgccccacaggccacacgctgcccaggctctgctgacttctgagcagttttccaggaggccggggggagcaggaggaggaaaggtagcccccgagggatgtccttggggaggggtcagctctggccacaatcctccccaccagtctcacccactaggataggaactgggccttgtgtgctggcttccgctgtcacccagcaaggcacaggctcctgtatttgagactaggatagcttcatcttgagcctgagccttagaatctgtagaggagcctggagtcggatctagccatggctggcagaggtttctagggtgggccccagccgtggcgtgaactgaggatgacccggggcagctggcaggagagagccttggcctgacctggcacagaaagggcagcttcagtctctgcagtgtccattatctgctgttccttcgagggttccaggctgtgtgtggggcccaagcatgccccacccacccctcctgggcccaggcagcacctggagcccacagagtctgtgtgtagccaggaagccccgctcaggtagccaccaccggggcactggctgctctgtcttggtcctgttaaccctccacctcctctcttggactccctccccaccccaaccactctttctttctcctttaacccaatggagactttctgatgcatcgttttctttgctgtgccaaagcaggtcagaagagggagaggaggggctgggggtgaggggccaggccatggccaaggggccagctgcccctcatttatcactctgaccttcacagggacagatctgatttatttattttggttaaaaaaaaaaaaaaggaacagaaacaactttgcattgcattggcttgacccataaactaagttatatccgtg

SEQ ID NO: 104 - DNA, 5113 bp, Homo sapiens
tttcattttgcagttactgggagggggcttgctgtggccctgtcaggaagagtagagctctggtccagctccgcgcagggagggaggctgtcaccatgccggcctgctgcagctgcagtgatgttttccagtatgagacgaacaaagtcactcggatccagagcatgaattatggcaccattaagtggttcttccacgtgatcatcttttcctacgtttgctttgctctggtgagtgacaagctgtaccagcggaaagagcctgtcatcagttctgtgcacaccaaggtgaaggggatagcagaggtgaaagaggagatcgtggagaatggagtgaagaagttggtgcacagtgtctttgacaccgcagactacaccttccctttgcaggggaactctttcttcgtgatgacaaactttctcaaaacagaaggccaagagcagcggttgtgtcccgagtatcccacccgcaggacgctctgttcctctgaccgaggttgtaaaaagggatggatggacccgcagagcaaaggaattcagaccggaaggtgtgtagtgtatgaagggaaccagaagacctgtgaagtctctgcctggtgccccatcgaggcagtggaagaggccccccggcctgctctcttgaacagtgccgaaaacttcactgtgctcatcaagaacaatatcgacttccccggccacaactacaccacgagaaacatcctgccaggtttaaacatcacttgtaccttccacaagactcagaatccacagtgtcccattttccgactaggagacatcttccgagaaacaggcgataatttttcagatgtggcaattcagggcggaataatgggcattgagatctactgggactgcaacctagaccgttggttccatcactgccgtcccaaatacagtttccgtcgccttgacgacaagaccaccaacgtgtccttgtaccctggctacaacttcagatacgccaagtactacaaggaaaacaatgttgagaaacggactctgataaaagtcttcgggatccgttttgacatcctggtttttggcaccggaggaaaatttgacattatccagctggttgtgtacatcggctcaaccctctcctacttcggtctggccgctgtgttcatcgacttcctcatcgacacttactccagtaactgctgtcgctcccatatttatccctggtgcaagtgctgtcagccctgtgtggtcaacgaatactactacaggaagaagtgcgagtccattgtggagccaaagccgacattaaagtatgtgtcctttgtggatgaatcccacattaggatggtgaaccagcagctactagggagaagtctgcaagatgtcaagggccaagaagtcccaagacctgcgatggacttcacagatttgtccaggctgcccctggccctccatgacacacccccgattcctggacaaccagaggagatacagctgcttagaaaggaggcgactcctagatccagggatagccccgtctggtgccagtgtggaagctgcctcccatctcaactccctgagagccacaggtgcctggaggagctgtgctgccggaaaaagccgggggcctgcatcaccacctcagagctgttcaggaagctggtcctgtccagacacgtcctgcagttcctcctgctctaccaggagcccttgctggcgctggatgtggattccaccaacagccggctgcggcactgtgcctacaggtgctacgccacctggcgcttcggctcccaggacatggctgactttgccatcctgcccagctgctgccgctggaggatccggaaagagtttccgaagagtgaagggcagtacagtggcttcaagagtccttactgaagccaggcaccgtggctcacgtctgtaatcccagcgctttgggaggccgaggcaggcagatcacctgaggtcgggagttggagacccgcctggctaacaaggcgaaatcctgtctgtactaaaaatacaaaaatcagccagacatggtggcatgcacctgcaatcccagctactcgggaggctgaggcacaagaatcacttgaacccgggaggcagaggttgtagtgagcccagattgtgccactgctctccagcctgggaggcacagcaaactgtcccccaaaaaaaaaaaagagtccttaccaatagcaggggctgcagtagccatgttaacatgacatttaccagcaacttgaacttcacctgcaaagctctgtggccacattttcagccaaagggaaatatgctttcatcttctgttgctctctgtgtctgagagcaaagtgacctggttaaacaaaccagaatccctctacatggactcagagaaaagagattgagatgtaagtctcaactctgtccccaggaagttgtgtgaccctaggcctctcacctctgtgcctctgtctccttgttgcccaactactatctcagagatattgtgaggacaaattgagacagtgcacatgaactgtcttttaatgtgtaaagatctacatgaatgcaaaacatttcattatgaggtcagactaggataatgtccaactaaaaacaaacccttttcatcctggctggagaatgtggagaactaaaggtggccacaaattctttgacactcaagtcccccaagacctaagggttttatctcctccccttgaatatgggtggctctgattgctttatccaaaagtggaagtgacattgtgtcagtttcagatcctgatcttaagaggctgacagcttctacttgctgtcccttggaactcttgctatcggggaagccagacgccatttaaaagtctgcctatcctggccaggtgtggtggctcacacctgtaatcccagcactttgggagaccaaggcgggcggatcacttaaagtcaggagtccaagaccagactcgccaacatggtgaaaccgtatctctaataaaaatacaaaaattagctgggcatggtgcgggcacctgtagtcctagctatcaagaggctgagacaggagaaacacttgaacctgggaggtggaggttgcattgagctgagatcgtgccactgcactccaggctgggtgacagagcgagactccatctcaaaaaaaaaaaaaagaaaaaaaaaatgtctgcctatcctgagactgccctgctgtgaggaagcccaagcagtcacgtggacagtgcctgaccagccccagctttcaagccatccaagcccagtcaccaaacatgagagagaagaagccttcaggtgattctggactccactaacatatgactgataccgcatgatacatcccaagtgagaactgccccataaatccagaaaaccacattgctatcttaagtccctaagtttggggcttatttgttccacagcaacaggtaactggaacagagggcaagcctgatgaatgggcacacagactcagcccataccttccctggttctaatgttctcagggagcccggaccaaccctgggagcctcaggaacttaggtttccactggacagttctagaagggctatagaccaaatcaggtaactcaccagaccagccttggaatctatcaaatctaactgctgagctacccaatgcattccgatcctcatcacaattctttgactgaaggccgggcgtggtggctcacgcctgtaatcccagcactttgggaggctgaggcgggtggatcacctgaggtcaggagttcgagaccagcctggccaacatggtgagaccctgtctctactaagaatacaaaaattaggtgggtgtggcggtgggcgcctgtaatcccagctacttgggaggctgaggcaggagaatctcttgaacctggaaggtggaggttgcaataagccgagatagtgccactgcactccagcctagataacagagcaagactctgtctcaaaaaacaacaacaacaacaacaaaacaattctatgactgaaagtgactaaaaagctggctttatgccattaacactctgtactttgcagccaatcagaactgacgcagtctgggtgctagctgcttcaaaagcaacccacaccacacttttaccatttccatacatcaactgctgagaatatgaaaatgcacagtgacaggttttaggatcctgcttcaggatttccttttcctggtttggtcactagagttggctatttatctgtttctaaacaatagctattttatcgaatagtttagagaccactattaaatattgtgactgatgaaggatctgtgaatttttttatatatgttctaagagttaccattttgataccttttaaaaaccagcagctttctactatattcatgtaagacagcatgaataaaaccattttttgatacagggttttatttggctttaaactcaggaaccaagttaattatgccagattgaactttgatttttactaccttttcaaagatattttaaaaagtggattactacatatgatttctttggagcttacatttctttacttcacgaattctatgtcactgttacaagtttccattctgatggcttctgggcctttgtacctttgtttttggtgccttattcctagtatgtttctatcaccttaatgaggccgcagatggagtcagaatgtgaaattacaaataatcactggatccatctactgttttccatcaccttccccactgatgctctgggcgagagagtgatgtgtcacttcaactgtgtgtaatatgtcagacacgtcctacaataacaggcgtcatatttgtattatttttagtttactgtagaaaataatgtcaccgccaaaggtgatgagagtcacgttttgtaggatctgttttcttatacttaaagacagacttctgctacggtaattgccagtattcatggcttcctttctgtgtcagaagagaagggatctgctttctcttggctgatttcacatagcattggtaatagacatgcatttctctttctaaaggggagtaactttttaaacccttcctgattttagcctggcaatgtaagtgtccttaatgtgactgttttgataattaaaaaaaggtatataattta

SEQ ID NO: 105 - DNA, 2192 bp, Homo sapiens
gagcggaggagaccctgcggcgcgcggcggcggctcccgggcgtcccgggcccggtggcggcgcggctgtggttggctgagcgccgcgggccgccccccgcccgccccctcccctgctcccctcccccgcctcccgcggcggctggcgtcgggaaagtacagtaaaaagtccgagtgcagccgccgggcgcaggatgggatccggctcctccagctaccggcccaaggccatctacctggacatcgatggacgcattcagaaggtaatcttcagcaagtactgcaactccagcgacatcatggacctgttctgcatcgccaccggcctgcctcggaacacgaccatctccctgctgaccaccgacgacgccatggtctccatcgaccccaccatgcccgcgaattcagaacgcactccgtacaaagtgagacctgtggccatcaagcaactctccgctggtgtcgaggacaagagaaccacaagccgtggccagtctgctgagagaccactgagggacagacgggttgtgggcctggagcagccccggagggaaggagcatttgaaagtggacaggtagagcccaggcccagagagccccagggctgctaccaggaaggccagcgcatccctccagagagagaagaattaatccagagcgtgctggcgcaggttgcagagcagttctcaagagcattcaaaatcaatgaactgaaagctgaagttgcaaatcacttggctgtcctagagaaacgcgtggaattggaaggactaaaagtggtggagattgagaaatgcaagagtgacattaagaagatgagggaggagctggcggccagaagcagcaggaccaactgcccctgtaagtacagttttttggataaccacaagaagttgactcctcgacgcgatgttcccacttaccccaagtacctgctctctccagagaccatcgaggccctgcggaagccgacctttgacgtctggctttgggagcccaatgagatgctgagctgcctggagcacatgtaccacgacctcgggctggtcagggacttcagcatcaaccctgtcaccctcaggaggtggctgttctgcgtccacgacaactacagaaacaaccccttccacaacttccggcactgcttctgcgtggcccagatgatgtacagcatggtctggctctgcagtctccaggagaagttctcacaaacggatatcctgatcctaatgacagcggccatctgccacgatctggaccatcccggctacaacaacacgtaccagatcaatgcccgcacagagctggcggtccgctacaatgacatctcaccgctggagaaccaccactgcgccgtggccttccagatcctcgccgagcctgagtgcaacatcttctccaacatcccacctgatgggttcaagcagatccgacagggaatgatcacattaatcttggccactgacatggcaagacatgcagaaattatggattctttcaaagagaaaatggagaattttgactacagcaacgaggagcacatgaccctgctgaagatgattttgataaaatgctgtgatatctctaacgaggtccgtccaatggaagtcgcagagccttgggtggactgtttattagaggaatattttatgcagagcgaccgtgagaagtcagaaggccttcctgtggcaccgttcatggaccgagacaaagtgaccaaggccacagcccagattgggttcatcaagtttgtcctgatcccaatgtttgaaacagtgaccaagctcttccccatggttgaggagatcatgctgcagccactttgggaatcccgagatcgctacgaggagctgaagcggatagatgacgccatgaaagagttacagaagaagactgacagcttgacgtctggggccaccgagaagtccagagagagaagcagagatgtgaaaaacagtgaaggagactgtgcctgaggaaagcggggggcgtggctgcagttctggacgggctggccgagctgcgcgggatccttgtgcagggaagagctgccctgggcacctggcaccacaagaccatgttttctaagaaccattttgttcactgatacaaaaaaaaaaaaaggaattcatgatgctgtacagaattttatttttaaactgtcttttaaataatatattcttatacggaaa

SEQ ID NO: 106 - DNA, 1802 bp, Homo sapiens
gagaacttgcgcgggagccggactgagcggtgcgagcgcgcaggcgcggccgacggggcgggctgctactccggaatctgctaatcccagtcggtgccgcatccccagcccgccgccatggccgcctacaaactggtgctgatccggcacggcgagagcgcatggaacctggagaaccgcttcagcggctggtacgacgccgacctgagcccggcgggccacgaggaggcgaagcgcggcgggcaggcgctacgagatgctggctatgagtttgacatctgcttcacctcagtgcagaagagagcgatccggaccctctggacagtgctagatgccattgatcagatgtggctgccagtggtgaggacttggcgcctcaatgagcggcactatgggggtctaaccggtctcaataaagcagaaactgctgcaaagcatggtgaggcccaggtgaagatctggaggcgctcctatgatgtcccaccacctccgatggagcccgaccatcctttctacagcaacatcagtaaggatcgcaggtatgcagacctcacagaagatcagctaccctcctgtgagagtctgaaggatactattgccagagctctgcccttctggaatgaagaaatagttccccagatcaaggaggggaaacgtgtactgattgcagcccatggcaacagcctccggggcattgtcaagcatctggagggtctctctgaagaggctatcatggagctgaacctgccgactggtattcccattgtctatgaattggacaagaacttgaagcctatcaagcccatgcagtttctgggggatgaagagacggtgcgcaaagccatggaagctgtggctgcccagggcaaggccaagaagtgaaggccggcggggaggatactgtccccaggagcaccctccctgcccgtcttgtccctctgcccctcccacctgcacatgtcacactgaccacatctgtagacatcttgagttgtagctgcagacggggaccagtggctcccattttcattttagccattttgtcgcctgcacccactcccttcatacaatctagtcagaatagcagttctagagcacaggttctcagtctaagctatggaaaagctccccttatccaacagagtttaaaagtagtgacttgggtttttgcgagtgctttgtttactaaggactttggggaggaaccatgctaagccatgaccagtgaggagaagcaacagagcctgtctgtccccatgagcggagtctgtcctctgctcttctgcagtcaggtcactgcctactgcctgggggctctagtcattccagtggaagacgaatgtaacctgcgtggtgatgtgacaactgtttcctccctgaccccagaggatctggctctaggttgggatcaatcctgaatttcgttatgtgttaatttacttttattaaaaaagtatagtatatataatacaaaacaataacccttctggggtttcttgtggcggttgaaatagtcccacatgtggtcatcagaaaataagccattcctcataccaatataggatcagctccttgacctctgaggggcaggagtgcttcctggtgtgtgtattagaatcccttcctgccttgtttcatggcagtgaaatgcctcttggtcctgtccaagtgtatctttcactgatttctgaatcatgttctagttgcttgaccctgccacatgggtccagtgttcatctgagcataactgtactaaatcctttttccatatcagtataataaaggagtgatgtgcaatagct

SEQ ID NO: 107 - DNA, 1368 bp, Homo sapiens
aggagagaagacgtgcagggaccccgcgcacaggagctgccctcgcgacatgggtcacccgccgctgctgccgctgctgctgctgctccacacctgcgtcccagcctcttggggcctgcggtgcatgcagtgtaagaccaacggggattgccgtgtggaagagtgcgccctgggacaggacctctgcaggaccacgatcgtgcgcttgtgggaagaaggagaagagctggagctggtggagaaaagctgtacccactcagagaagaccaacaggaccctgagctatcggactggcttgaagatcaccagccttaccgaggttgtgtgtgggttagacttgtgcaaccagggcaactctggccgggctgtcacctattcccgaagccgttacctcgaatgcatttcctgtggctcatcagacatgagctgtgagaggggccggcaccagagcctgcagtgccgcagccctgaagaacagtgcctggatgtggtgacccactggatccaggaaggtgaagaagggcgtccaaaggatgaccgccacctccgtggctgtggctaccttcccggctgcccgggctccaatggtttccacaacaacgacaccttccacttcctgaaatgctgcaacaccaccaaatgcaacgagggcccaatcctggagcttgaaaatctgccgcagaatggccgccagtgttacagctgcaaggggaacagcacccatggatgctcctctgaagagactttcctcattgactgccgaggccccatgaatcaatgtctggtagccaccggcactcacgaaccgaaaaaccaaagctatatggtaagaggctgtgcaaccgcctcaatgtgccaacatgcccacctgggtgacgccttcagcatgaaccacattgatgtctcctgctgtactaaaagtggctgtaaccacccagacctggatgtccagtaccgcagtggggctgctcctcagcctggccctgcccatctcagcctcaccatcaccctgctaatgactgccagactgtggggaggcactctcctctggacctaaacctgaaatccccctctctgccctggctggatccgggggacccctttgcccttccctcggctcccagccctacagacttgctgtgtgacctcaggccagtgtgccgacctctctgggcctcagttttcccagctatgaaaacagctatctcacaaagttgtgtgaagcagaagagaaaagctggaggaaggccgtgggccaatgggagagctcttgttattattaatattgttgccgctgttgtgttgttgttattaattaatattcatattatttattttatacttacataaagattttgtaccagtgga

SEQ ID NO: 108 - DNA, 8666 bp, Homo sapiens
agaagtagcgagcgccggcggcggagggcgtgagcggcgctgagtgacccgagtcgggacgcgggctgcgcgcgcgggaccccggagcccaaacccggggcaggcgggcagctgtgcccgggcggcacggccagcttcctgatttctcccgattccttccttctccctggagcggccgacaatgtccaccacggtcaatgtagattcccttgcggaatatgagaagagccagatcaagagagccctggagctggggacggtgatgactgtgttcagcttccgcaagtccacccccgagcggagaaccgtccaggtgatcatggagacgcggcaggtggcctggagcaagaccgctgacaagatcgagggcttcttggatatcatggaaataaaagaaatccgcccagggaagaactccaaagatttcgagcgagcaaaagcagttcgccagaaagaagactgctgcttcaccatcctatatggcactcagttcgtcctcagcacgctcagcttggcagctgactctaaagaggatgcagttaactggctctctggcttgaaaatcttacaccaggaagcgatgaatgcgtccacgcccaccattatcgagagttggctgagaaagcagatatattctgtggatcaaaccagaagaaacagcatcagtctccgagagttgaagaccatcttgcccctgatcaactttaaagtgagcagtgccaagttccttaaagataagtttgtggaaataggagcacacaaagatgagctcagctttgaacagttccatctcttctataaaaaacttatgtttgaacagcaaaaatcgattctcgatgaattcaaaaaggattcgtccgtgttcatcctggggaacactgacaggccggatgcctctgctgtttacctgcatgacttccagaggtttctcatacatgaacagcaggagcattgggctcaggatctgaacaaagtccgtgagcggatgacaaagttcattgatgacaccatgcgtgaaactgctgagcctttcttgtttgtggatgagttcctcacgtacctgttttcacgagaaaacagcatctgggatgagaagtatgacgcggtggacatgcaggacatgaacaaccccctgtctcattactggatctcctcgtcacataacacgtaccttacaggtgaccagctgcggagcgagtcgtccccagaagcttacatccgctgcctgcgcatgggctgtcgctgcattgaactggactgctgggacgggcccgatgggaagccggtcatctaccatggctggacgcggactaccaagatcaagtttgacgacgtcgtgcaggccatcaaagaccacgcctttgttacctcgagcttcccagtgatcctgtccatcgaggagcactgcagcgtggagcaacagcgtcacatggccaaggccttcaaggaagtatttggcgacctgctgttgacgaagcccacggaggccagtgctgaccagctgccctcgcccagccagctgcgggagaagatcatcatcaagcataagaagctgggcccccgaggcgatgtggatgtcaacatggaggacaagaaggacgaacacaagcaacagggggagctgtacatgtgggattccattgaccagaaatggactcggcactactgcgccattgccgatgccaagctgtccttcagtgatgacattgaacagactatggaggaggaagtgccccaggatataccccctacagaactacattttggggagaaatggttccacaagaaggtggagaagaggacgagtgccgagaagttgctgcaggaatactgcatggagacggggggcaaggatggcaccttcctggttcgggagagcgagaccttccccaatgactacaccctgtccttctggcggtcaggccgggtccagcactgccggatccgctccaccatggagggcgggaccctgaaatactacttgactgacaacctcaccttcagcagcatctatgccctcatccagcactaccgcgagacgcacctgcgctgcgccgagttcgagctgcggctcacggaccctgtgcccaaccccaacccccacgagtccaagccgtggtactatgacagcctgagccgcggagaggcagaggacatgctgatgaggattccccgggacggggccttcctgatccggaagcgagaggggagcgactcctatgccatcaccttcagggctaggggcaaggtaaagcattgtcgcatcaaccgggacggccggcactttgtgctggggacctccgcctattttgagagtctggtggagctcgtcagttactacgagaagcattcactctaccgaaagatgagactgcgctaccccgtgacccccgagctcctggagcgctacaatatggaaagagatataaactccctctacgacgtcagcagaatgtatgtggatcccagtgaaatcaatccgtccatgcctcagagaaccgtgaaagctctgtatgactacaaagccaagcgaagcgatgagctgagcttctgccgtggtgccctcatccacaatgtctccaaggagcccgggggctggtggaaaggagactatggaaccaggatccagcagtacttcccatccaactacgtcgaggacatctcaactgcagacttcgaggagctagaaaagcagattattgaagacaatcccttagggtctctttgcagaggaatattggacctcaatacctataacgtcgtgaaagcccctcagggaaaaaaccagaagtcctttgtcttcatcctggagcccaagcagcagggcgatcctccggtggagtttgccacagacagggtggaggagctctttgagtggtttcagagcatccgagagatcacctggaagattgacaccaaggagaacaacatgaagtactgggagaagaaccagtccatcgccatcgagctctctgacctggttgtctactgcaaaccaaccagcaaaaccaaggacaacttagaaaatcctgacttccgagaaatccgctcctttgtggagacgaaggctgacagcatcatcagacagaagcccgtcgacctcctgaagtacaatcaaaagggcctgacccgcgtctacccaaagggacaaagagttgactcttcaaactacgaccccttccgcctctggctgtgcggttctcagatggtggcactcaatttccagacggcagataagtacatgcagatgaatcacgcattgttttctctcaatgggcgcacgggctacgttctgcagcctgagagcatgaggacagagaaatatgacccgatgccacccgagtcccagaggaagatcctgatgacgctgacagtcaaggttctcggtgctcgccatctccccaaacttggacgaagtattgcctgtccctttgtagaagtggagatctgtggagccgagtatgacaacaacaagttcaagacgacggttgtgaatgataatggcctcagccctatctgggctccaacacaggagaaggtgacatttgaaatttatgacccaaacctggcatttctgcgctttgtggtttatgaagaagatatgttcagcgatcccaactttcttgctcatgccacttaccccattaaagcagtcaaatcaggattcaggtccgttcctctgaagaatgggtacagcgaggacatagagctggcttccctcctggttttctgtgagatgcggccagtcctggagagcgaagaggaactttactcctcctgtcgccagctgaggaggcggcaagaagaactgaacaaccagctctttctgtatgacacacaccagaacttgcgcaatgccaaccgggatgccctggttaaagagttcagtgttaatgagaaccagctccagctgtaccaggagaaatgcaacaagaggttaagagagaagagagtcagcaacagcaagttttactcatagaagctggggtatgtgtgtaagggtattgtgtgtgtgcgcatgtgtgtttgcatgtaggagaacgtgccctattcacactctgggaagacgctaatctgtgacatcttttcttcaagcctgccatcaaggacatttcttaagacccaactggcatgagttggggtaatttcctattattttcatcttggacaactttcttaacttatattctttatagaggattccccaaaatgtgctcctcatttttggcctctcatgttccaaacctcattgaataaaagcaatgaaaaccttgatcaattaagccttctgttgcacgacctgtgcagtgaacaggatttcttttctggccaagaagattctacctctaatgatccaggtaactgatgtccatggaggatgagctggaaatgtaagaaactattcatgagattctgaaaaggattttaactcaaaggcaaatgattccataagggcccaaagagaagccctacccacaggcagcctgctcagttcaatgtactttaactaccaccggctgcctgctgcagtccacaagaaaatggctgagtgatgggatctgttcattaagacaatttctaattaatggtgacagcttgttttgtgactagagttactgggatggagggtaggaatcttggggcctctttgttttaaaaagcccatcagagagaccagagccgtgctgcaggggcaggttctcacttgcccctggctctgccagctgctgggaggctctggccccactagtccctcatggccctactgaactggctgggaggctgctggaatggcccttggtccacagctctccacaggcaagaggtcaactgctgcttgaaagaggtagacaaaagttaggttgatggcgaaatgtctctgggttacccagtcttctggagcagcaagctgagctttaatgggctaagcattagggtgttacagaaaatttcaaatgcagccatctcccttggggcagatctacctagttcatgacagtatgtgcggctggccagggctttacacctctgcatcttaagttgttaatacataccaataatgtaatatggctttttaaaggagaggagagtgctgggttgggaagggaggtggttggtagagtcacaacttctcaatgagtgaatttacagctgatgggaaaaggagtgtaactgtgaaaaacgatggctgtggtggggaagaacaaaccagcagtaagcctgatgtttgatgtggatggaactggcccctagaaacccatctgaccctcctcttgttacccgaaatgctgggcttagtatgcatgtactgctgaaaagcagggcagaacaaatcaggctctgaccagaagatccttctggtcccttcactctacaaaaacttactgatcacctccacatgccaaatacagtgccaagatttgggggtgtggatgtttaaacaaaaagctgtgggtctcatcaatcatctccatccacaagctcctaaaagaaagccatttacctcgcttgaagccaggaacacagggaacagcagtctggccaaggaagggctgttatctggtgctatcactccagttactcctccaactgggagctgctattttatttggcagtcagcaactgaagaaagaacattcctcttagtggcagatgttcaaagcaactttcaagaaaggctaggtgagaaaggcactgggatgagtgctgcaggcactctgtagccagggccccattagcctttggccaggtagccaccagaacctatttattgcacctggcatctcccccaacccctctcagctctgttaggacttccacacagcagagctcaggtgttgctgtcattacctcctttcagctcctcacttcattctactttaaagccacagtgctaaggcctgcatcccctttctgcccaaatgggttttttgctaccatatcaaagaacctgacatatggcggcataggaagcagaagctaagcctctctccagctgctgctgtgtaaaatccatgcgtggccaaagagaagtcaggggattatgacataaatggtgctgggaagaaccctctgcctaaaactgtctccttctcctggtgctacaaccggaatccaccatgagagagtactttcttcggttctttcctcctgtccttgacagagtaacacgttaatctggttcttggtggtgttagggactgattctctcaggaaaggcacacatggtatgatggctcttcccagagtctatgtgatgctacataacttcagtatctagctgagacatgcttcctacatgactgttaaagcacagccaatccaggccaagaagactagtaacaggcacattctgaaagatggaagcagcactgatagatcaaaaccaccactgcatatgtattacactgtttttgttcaccattttcctaagtgtgttatttagaatattggttattacaaggaaaaataaagtggggaggctggttaggccttgtgagtttgggaaacttaggttataaaaactaaataaagtttttctactgtgagactagatgtgcaggagtgaaaggtgtagagggtcttgttttccaaattcgatctcagaatctttttgccagaagtgtctcatgggacttatctatagtggaacacatttgaagacctactgctctattaagaaggcagccggacaacatgttctaatacttcgtatgctttgtgacctagttaaaatctaaacttaagtcgccatggccagtggcctttagattaagctagccttacccctgggagtataccagagctttccaaggaatacacagactccagtactctcaggggagcagtgttcagagcctcatcttcctgttatattcttctctaagattcatctgcctgagaaaatgcccttttctcaccttacaaaagaaaatatggctgtctccacctctagtcttactgtagagcatgtcccaaggtgtaaaaattcaaaatgtggatatttggaaagtgaaagacttatcaacagggcacaaatctttttgcaaatggattttccaagtttttctggtggttccaaattttttgctttcaacaaagtgggaggaacagcctgtagatttctgagtctcttagcatgtaactacaaaggggttggaagaattcagtgattctgctatcataaagcttccgttcccattgatgtatctgtgtgaacaaggatcaacatctccataaatgaaattgaaaacggaaaatagaattgatgatgaactttggctcaatcttaagatgttatcaatctacatagatgaaataattgtggagaaaagccctctttatctcattaagtgatacatttccaaagaagttttactatgtttaataatttagtgaaatttgggctatgtgtttattgattcagctcaatccagaggaaaattttaaaggcttacagccttaggattataggatactatataatacttttggtacagagatagaattaaataacataaaaatcaaaaatttattaggctaaaattttgagggagaagtggtatgaaaatacaaattcaaggagtaaaaggaaaagtggggcattccttgctactaaaaattgccttgttccaggtaagactgatcataaaaaaatggccctgttcataaaatttttaaaaagatcatagtatctatcaaataacttatattaagaacctcctgggctaaatttaaaaagtaatacaacagttttatttaaacatgtagtgtctacggtatgccagcactttgcagctatttataatgagaaattttagatgtcaatatagcaatgtgcaagaagatagagattttcaaaattcacttaagagtatctgagcataaaatgttaagattgctgatcggatgtgagggcgatctggctgcgacatctgtcaccccattgatcgccagggttgattcggctgatctggctggctaggtgggtgtccccttcctacctcaccgctccatgtgcgtccctcccgaagctgcgcgctccgtcgaagaggacgaccaaccccgatagaggaggaccggtcttcggtcaagggtatacgagtagctgcgctcccctgctggaacctccaaacaagctctcaagattgctgatctagggccactaagtgatgaattgtatttggaagcaaaaaggatggctaaaaaggacctcaacccttttgactttaaaaggaaaatagcttaaccttcaacctgtgtgacatttaactttttgaacccaaccgtaaaagctatcttctaaccaacaaaaagttaataattagatttggaattatacagaattagaaaattggcatttaaaaatactcaataatttgtccctggtttttaattttcaaaatattttctttttgaagagccagattccagtgatcctgcctctcagaaatttccacatttcttatttttcattaggccttaagaagctgcatttgtaaacttgtgtttcattattaaagcttaatttattttttatataaatagtatgtgctttgtgtacatagagaattaagtgaatgagtcacacagatgttggctgttgttaatgtgaaaattaaacagctgtatcacattttgaaaaataaaagtttcatctgaatgaa

SEQ ID NO: 109 - DNA, 4361 bp, Homo sapiens
agcagacgagggcttgtgcgagagggggccgggcggctgcagggaaggcggagtccaaggggaaaacgaaactgagaaccagctctcccgaagccgcgggtctccggccggcggcggcggcggcggcggcggcggcgcagtttgctcatactttgtgacttgcggtcacagtggcattcagctccacacttggtagaaccacaggcacgacaagcatagaaacatcctaaacaatcttcatcgaggcatcgaggtccatcccaataaaaatcaggagaccctggctatcatagaccttagtcttcgctggtatcactcgtctgtctgaaccagcggttgcatttttttaagccttcttttttctcttttaccagtttctggagcaaattcagtttgccttcctggatttgtaaattgtaatgacctcaaaactttagcagttcttccatctgactcaggtttgcttctctggcggtcttcagaatcaacatccacacttccgtgattatctgcgtgcattttggacaaagcttccaaccaggatacgggaagaagaaatggctggtgatctttcagcaggtttcttcatggaggaacttaatacataccgtcagaagcagggagtagtacttaaatatcaagaactgcctaattcaggacctccacatgataggaggtttacatttcaagttataatagatggaagagaatttccagaaggtgaaggtagatcaaagaaggaagcaaaaaatgccgcagccaaattagctgttgagatacttaataaggaaaagaaggcagttagtcctttattattgacaacaacgaattcttcagaaggattatccatggggaattacataggccttatcaatagaattgcccagaagaaaagactaactgtaaattatgaacagtgtgcatcgggggtgcatgggccagaaggatttcattataaatgcaaaatgggacagaaagaatatagtattggtacaggttctactaaacaggaagcaaaacaattggccgctaaacttgcatatcttcagatattatcagaagaaacctcagtgaaatctgactacctgtcctctggttcttttgctactacgtgtgagtcccaaagcaactctttagtgaccagcacactcgcttctgaatcatcatctgaaggtgacttctcagcagatacatcagagataaattctaacagtgacagtttaaacagttcttcgttgcttatgaatggtctcagaaataatcaaaggaaggcaaaaagatctttggcacccagatttgaccttcctgacatgaaagaaacaaagtatactgtggacaagaggtttggcatggattttaaagaaatagaattaattggctcaggtggatttggccaagttttcaaagcaaaacacagaattgacggaaagacttacgttattaaacgtgttaaatataataacgagaaggcggagcgtgaagtaaaagcattggcaaaacttgatcatgtaaatattgttcactacaatggctgttgggatggatttgattatgatcctgagaccagtgatgattctcttgagagcagtgattatgatcctgagaacagcaaaaatagttcaaggtcaaagactaagtgccttttcatccaaatggaattctgtgataaagggaccttggaacaatggattgaaaaaagaagaggcgagaaactagacaaagttttggctttggaactctttgaacaaataacaaaaggggtggattatatacattcaaaaaaattaattcatagagatcttaagccaagtaatatattcttagtagatacaaaacaagtaaagattggagactttggacttgtaacatctctgaaaaatgatggaaagcgaacaaggagtaagggaactttgcgatacatgagcccagaacagatttcttcgcaagactatggaaaggaagtggacctctacgctttggggctaattcttgctgaacttcttcatgtatgtgacactgcttttgaaacatcaaagtttttcacagacctacgggatggcatcatctcagatatatttgataaaaaagaaaaaactcttctacagaaattactctcaaagaaacctgaggatcgacctaacacatctgaaatactaaggaccttgactgtgtggaagaaaagcccagagaaaaatgaacgacacacatgttagagcccttctgaaaaagtatcctgcttctgatatgcagttttccttaaattatctaaaatctgctagggaatatcaatagatatttaccttttattttaatgtttcctttaattttttactatttttactaatctttctgcagaaacagaaaggttttcttctttttgcttcaaaaacattcttacattttactttttcctggctcatctctttattctttttttttttttaaagacagagtctcgctctgttgcccaggctggagtgcaatgacacagtcttggctcactgcaacttctgcctcttgggttcaagtgattctcctgcctcagcctcctgagtagctggattacaggcatgtgccacccacccaactaatttttgtgtttttaataaagacagggtttcaccatgttggccaggctggtctcaaactcctgacctcaagtaatccacctgcctcggcctcccaaagtgctgggattacagggatgagccaccgcgcccagcctcatctctttgttctaaagatggaaaaaccacccccaaattttctttttatactattaatgaatcaatcaattcatatctatttattaaatttctaccgcttttaggccaaaaaaatgtaagatcgttctctgcctcacatagcttacaagccagctggagaaatatggtactcattaaaaaaaaaaaaaaaagtgatgtacaaccacttcggaaaacaatttggcattatctagtaaagttgaatccatgtatacccacatagctatcaattctattcctacatacgtgcttacaagaatgtccataaaaccctgtttataatagccaaaagaacagggaacaaccataatgcacatcaaaagaagaatggattaaaaaaattatattcacacacaggagtactatatagtattgaaaacaattgaagtacagctaaatgtaataacgtaacacaatacaactctcagaaacataatgttaagcgaacaaagcaggttttcagaaaatatatgcagaataattccatttatataaagttccagagcatgcaaaactaaatcattttgtataaaaaacccaacaaatgtgatgagacaataatgggaaggaagggaatgagaaatattaaattctggatggtggttatctttgagggaggggaatgatgtgattggggaaatggactttcaaaggtaatggtaacttccttaagctggatggtaggtccactagtgtttgctgcatagttataccttttatcttaaatacattttgtatctattgtaacaaccactttaaagacaaccgtgctgtaaggcagtagctaaaaacagaaaatagtccatcgggaagggtaagatggctttctgctgagcacagggctagaagtgacagcccagtgggccttccaactatatgccagggtgttagatgagtagagaggagaccacccaggaagtctggacaaggggtctggcatgagctctggagaagatatatttgaggaacatggggtatgctagtttgttgtcctgaattgctgtagagaagataatttaaattgcatcttagaagacgaccctgagggtgaatttcaacttagggcaattgttttagtttgtttcttattggtttaaatggatacttgaagctggataatttataaggaaaagagatttatatgacttacagttctgcaggctgtacaagaaacatggcaccagcatctgcttcttccccggctgcttccactcatggtggaaggtgaaggggagccggatgtgcagagatcatatggcaagagaggaagcaagagagcgagggagaaggtgccaggctctttttaaataaccggctcttgagggaactaatagattgagaactccttgcttctcctccccagcacaccccacccccagggacggcattaatgtattcatgaggggtcttcccccatgacccaaacacctcccatcaggccccacctccaacactgggatcaaatttcaacatgagattttgggggacaaacatgcaaactatagcagcaaccagctaccattctaaaactgccatatgattttaggatttttaaaaagggccaaatttaggttaagcaaaaaaaaaaaaaaaaaa

SEQ ID NO: 110 - DNA, 1532 bp, Homo sapiens
agaaggaggaaggacagcacagctgacagccgtgctctggaagcttctggatcctaggctcatctccacagaggagaacatgcacgcagcagagatcatggggcccctctcagcccctccctgcacagagcacatcaaatggaaggggctcctgctcacagcattacttttaaacttctggaacttgcctaccactgcccaagtcatgattgaagcccagccacccaaagtgtccgaggggaaggatgttcttctacttgtccacaatttgccccagaatcttactggctacatctggtacaaagggcaaatcagggacctctaccattacattacatcatatgtagtagacggtcaaataattatatatggaccggcatacagtggacgagaaacagtatattccaatgcatccctgctgatccagaatgtcacccgggaggacgcaggatcctacaccttacacatcataaagcgaggtgatgggactagaggagtaactggatatttcaccttcaccttatacctggagactcccaagccctccatctccagcagcaacttaaaccccagggaggccatggagactgtgatcttaacctgtaatcctgagactccggacgcaagctacctgtggtggatgaatggtcagagcctccctatgactcataggatgcagctgtctgaaaccaacaggaccctctttctatttggtgtcacaaagtatactgcaggaccctatgaatgtgaaatatggaactcagggagtgccagccgcagtgacccagtcaccctgaatctcctccatggtccagacctccccagaattttcccttcagtcacctcttactattcaggagagaacctcgacttgtcctgcttcgcaaactctaacccaccagcacagtattcttggacaattaatgggaagtttcagctatcaggacaaaagctctttatccctcagattactccaaagcataatgggctctatgcttgctctgctcgtaactcagccactggcgaggaaagctccacatccttgacaatcagagtcattgctcctccaggattaggaacttttgctttcaataatccaacgtagcagccgtgatgtcatttttgtatttcaggaagactggcaggagatttatggaaaagactatgaaaaggactcttgaatacaagttcctgataacttcaagatcataccactggactaagaactttcaaaattttgatgaacaggctgataccttcatgaaattcaagacaaagaagaaaagaactccatttcattggactaaataacaaaaggataatgttttcataattttttattggaaaatgtgctgattttttgaatgttttatcctccagatttatgaatttttttcttcagcaattggtaaagtatacttttgtaaacaaaaattgaaacatttgcttttgctctctgagtgccccagaattgggaatctattcatgaatattcatatgtttatggtaataaagttatttgcacaagttta

SEQ ID NO: 111 - DNA, 1017 bp, Homo sapiens
agtgccccaggcggcgaggagagcggtgccttgcagggatgctgcgggcgggagcaccaaccggggacttaccccgggcgggagaagtccacaccgggaccaccatcatggcagtggagtttgacgggggcgttgtgatgggttctgattcccgagtgtctgcaggcgaggcggtggtgaaccgagtgtttgacaagctgtccccgctgcacgagcgcatctactgtgcactctctggttcagctgctgatgcccaagccgtggccgacatggccgcctaccagctggagctccatgggatagaactggaggaacctccacttgttttggctgctgcaaatgtggtgagaaatatcagctataaatatcgagaggacttgtctgcacatctcatggtagctggctgggaccaacgtgaaggaggtcaggtatatggaaccctgggaggaatgctgactcgacagccttttgccattggtggctccggcagcacctttatctatggttatgtggatgcagcatataagccaggcatgtctcccgaggagtgcaggcgcttcaccacagacgctattgctctggccatgagccgggatggctcaagcgggggtgtcatctacctggtcactattacagctgccggtgtggaccatcgagtcatcttgggcaatgaactgccaaaattctatgatgagtgaaccttccccagacttctctttcttattttgtaataaactctctagggccaaaacctggtatggtcattgggaaatgagtgctcagggagatggagcttaggggaggtgggtgcttccctcctagatgtcagcatacactctttcttcttttgtcccaggtctaaaacatctttcctagagaaaacaaaagggactaaactagaaatataaagagccctatacatgacaggtgatcacgtactgaatgattttgaagtagtacaaacaataaaaattctcattccgcatcatcatgcggtccatgatgatgaggccgcaa

SEQ ID NO: 112 - DNA, 741 bp, Homo sapiens
gagaggctgagactaacccagaaacatccaattctcaaactgaagctcgcactctcgcctccagcatgaaagtctctgccgcccttctgtgcctgctgctcatagcagccaccttcattccccaagggctcgctcagccagatgcaatcaatgccccagtcacctgctgttataacttcaccaataggaagatctcagtgcagaggctcgcgagctatagaagaatcaccagcagcaagtgtcccaaagaagctgtgatcttcaagaccattgtggccaaggagatctgtgctgaccccaagcagaagtgggttcaggattccatggaccacctggacaagcaaacccaaactccgaagacttgaacactcactccacaacccaagaatctgcagctaacttattttcccctagctttccccagacaccctgttttattttattataatgaattttgtttgttgatgtgaaacattatgccttaagtaatgttaattcttatttaagttattgatgttttaagtttatctttcatggtactagtgttttttagatacagagacttggggaaattgcttttcctcttgaaccacagttctacccctgggatgttttgagggtctttgcaagaatcattaatacaaagaattttttttaacattccaatgcattgctaaaatattattgtggaaatgaatattttgtaactattacaccaaataaatatatttttgtacaaaa

SEQ ID NO: 113 - DNA, 780 bp, Homo sapiens
agaaggacacgggcagcagacagtggtcagtcctttcttggctctgctgacactcgagcccacattccgtcacctgctcagaatcatgcaggtctccactgctgcccttgctgtcctcctctgcaccatggctctctgcaaccagttctctgcatcacttgctgctgacacgccgaccgcctgctgcttcagctacacctcccggcagattccacagaatttcatagctgactactttgagacgagcagccagtgctccaagcccggtgtcatcttcctaaccaagcgaagccggcaggtctgtgctgaccccagtgaggagtgggtccagaaatatgtcagcgacctggagctgagtgcctgaggggtccagaagcttcgaggcccagcgacctcggtgggcccagtggggaggagcaggagcctgagccttgggaacatgcgtgtgacctccacagctacctcttctatggactggttgttgccaaacagccacactgtgggactcttcttaacttaaattttaatttatttatactatttagtttttgtaatttattttcgatttcacagtgtgtttgtgattgtttgctctgagagttcccctgtcccctcccccttccctcacaccgcgtctggtgacaaccgagtggctgtcatcagcctgtgtaggcagtcatggcaccaaagccaccagactgacaaatgtgtatcggatgcttttgttcagggctgtgatcggcctggggaaataataaagatgctcttttaaaaggtaaa

SEQ ID NO: 114 - DNA, 660 bp, Homo sapiens
agcacaggacacagctgggttctgaagcttctgagttctgcagcctcacctctgagaaaacctcttttccaccaataccatgaagctctgcgtgactgtcctgtctctcctcatgctagtagctgccttctgctctccagcgctctcagcaccaatgggctcagaccctcccaccgcctgctgcttttcttacaccgcgaggaagcttcctcgcaactttgtggtagattactatgagaccagcagcctctgctcccagccagctgtggtattccaaaccaaaagaagcaagcaagtctgtgctgatcccagtgaatcctgggtccaggagtacgtgtatgacctggaactgaactgagctgctcagagacaggaagtcttcagggaaggtcacctgagcccggatgcttctccatgagacacatctcctccatactcaggactcctctccgcagttcctgtcccttctcttaatttaatcttttttatgtgccgtgttattgtattaggtgtcatttccattatttatattagtttagccaaaggataagtgtcccctatggggatggtccactgtcactgtttctctgctgttgcaaatacatggataacacatttgattctgtgtgttttcataataaaactttaaaataaaatgca

SEQ ID NO: 115 - DNA, 1217 bp, Homo sapiens
cctgcagaggatcaagacagcacgtggacctcgcacagcctctcccacaggtaccatgaaggtctccgcggcagccctcgctgtcatcctcattgctactgccctctgcgctcctgcatctgcctccccatattcctcggacaccacaccctgctgctttgcctacattgcccgcccactgccccgtgcccacatcaaggagtatttctacaccagtggcaagtgctccaacccagcagtcgtctttgtcacccgaaagaaccgccaagtgtgtgccaacccagagaagaaatgggttcgggagtacatcaactctttggagatgagctaggatggagagtccttgaacctgaacttacacaaatttgcctgtttctgcttgctcttgtcctagcttgggaggcttcccctcactatcctaccccacccgctccttgaagggcccagattctaccacacagcagcagttacaaaaaccttccccaggctggacgtggtggctcacgcctgtaatcccagcactttgggaggccaaggtgggtggatcacttgaggtcaggagttcgagaccagcctggccaacatgatgaaaccccatctctactaaaaatacaaaaaattagccgggcgtggtagcgggcgcctgtagtcccagctactcgggaggctgaggcaggagaatggcgtgaacccgggaggcggagcttgcagtgagccgagatcgcgccactgcactccagcctgggcgacagagcgagactccgtctcaaaaaaaaaaaaaaaaaaaaaaatacaaaaattagccgggcgtggtggcccacgcctgtaatcccagctactcgggaggctaaggcaggaaaattgtttgaacccaggaggtggaggctgcagtgagctgagattgtgccacttcactccagcctgggtgacaaagtgagactccgtcacaacaacaacaacaaaaagcttccccaactaaagcctagaagagcttctgaggcgctgctttgtcaaaaggaagtctctaggttctgagctctggctttgccttggctttgccagggctctgtgaccaggaaggaagtcagcatgcctctagaggcaaggaggggaggaacactgcactcttaagcttccgccgtctcaacccctcacaggagcttactggcaaacatgaaaaatcggcttaccattaaagttctcaatgcaaccataaa

SEQ ID NO: 116 - DNA, 2436 bp, Homo sapiens
acagtgctccggatcctccaatcttcgctcctccaatctccgctcctccacccagttcaggaacccgcgaccgctcgcagcgctctcttgaccactatgagcctcctgtccagccgcgcggcccgtgtccccggtccttcgagctccttgtgcgcgctgttggtgctgctgctgctgctgacgcagccagggcccatcgccagcgctggtcctgccgctgctgtgttgagagagctgcgttgcgtttgtttacagaccacgcaaggagttcatcccaaaatgatcagtaatctgcaagtgttcgccataggcccacagtgctccaaggtggaagtggtagcctccctgaagaacgggaaggaaatttgtcttgatccagaagccccttttctaaagaaagtcatccagaaaattttggacggtggaaacaaggaaaactgattaagagaaatgagcacgcatggaaaagtttcccagtcttcagcagagaagttttctggaggtctctgaacccagggaagacaagaaggaaagattttgttgttgtttgtttatttgtttttccagtagttagctttcttcctggattcctcactttgaagagtgtgaggaaaacctatgtttgccgcttaagctttcagctcagctaatgaagtgtttagcatagtacctctgctatttgctgttattttatctgctatgctattgaagttttggcaattgactatagtgtgagccaggaatcactggctgttaatctttcaaagtgtcttgaattgtaggtgactattatatttccaagaaatattccttaagatattaactgagaaggctgtggatttaatgtggaaatgatgtttcataagaattctgttgatggaaatacactgttatcttcacttttataagaaataggaaatattttaatgtttcttggggaatatgttagagaatttccttactcttgattgtgggatactatttaattatttcactttagaaagctgagtgtttcacaccttatctatgtagaatatatttccttattcagaatttctaaaagtttaagttctatgagggctaatatcttatcttcctataattttagacattctttatctttttagtatggcaaactgccatcatttacttttaaactttgattttatatgctatttattaagtattttattaggagtaccataattctggtagctaaatatatattttagatagatgaagaagctagaaaacaggcaaattcctgactgctagtttatatagaaatgtattcttttagtttttaaagtaaaggcaaacttaacaatgacttgtactctgaaagttttggaaacgtattcaaacaatttgaatataaatttatcatttagttataaaaatatatagcgacatcctcgaggccctagcatttctccttggataggggaccagagagagcttggaatgttaaaaacaaaacaaaacaaaaaaaaacaaggagaagttgtccaagggatgtcaattttttatccctctgtatgggttagattttccaaaatcataatttgaagaaggccagcatttatggtagaatatataattatatataaggtggccacgctggggcaagttccctccccactcacagctttggcccctttcacagagtagaacctgggttagaggattgcagaagacgagcgggagcggggagggcagggaagatgcctgtcgggtttttagcacagttcatttcactgggattttgaagcatttctgtctgaatgtaaagcctgttctagtcctggtgggacacactggggttgggggtgggggaagatgcggtaatgaaaccggttagtcagtgttgtcttaatatccttgataatgctgtaaagtttatttttacaaatatttctgtttaagctatttcacctttgtttggaaatccttcccttttaaagagaaaatgtgacacttgtgaaaaggcttgtaggaaagctcctccctttttttctttaaacctttaaatgacaaacctaggtaattaatggttgtgaatttctatttttgctttgtttttaatgaacatttgtctttcagaataggattctgtgataatatttaaatggcaaaaacaaaacataattttgtgcaattaacaaagctactgcaagaaaaataaaacatttcttggtaaaaacgtatgtatttatatattatatatttatatataatatatattatatatttagcattgctgagctttttagatgcctattgtgtatcttttaaaggttttgaccattttgttatgagtaattacatatatattacattcactatattaaaattgtacttttttactatgtgtctcattggttcatagtctttattttgtcctttgaataaacattaaaagatttctaaacttca

SEQ ID NO: 117 - DNA, 2234 bp, Homo sapiens
aagtgtacagtggcatcaagctcagcgcgagctcccgggaacgctccaacgccttcagcctgtttcccaggaacggtccccggcttcgcgccccaatttctaacagcctgcctgtcccccgggaacgttctaacatccttggggagcgccccagctacaagacactgtcctgagaacgctgtcatcacccgtagttgcaagtttcggagcggcagtgggaagcatgcgggactacgacgaggtgatcgccttcctgggcgagtgggggcccttccagcgcctcatcttcttcctgctcagcgccagcatcatccccaatggcttcaatggtatgtcagtcgtgttcctggcggggaccccggagcaccgctgtcgagtgccggacgccgcgaacctgagcagcgcctggcgcaacaacagtgtcccgctgcggctgcgggacggccgcgaggtgccccacagctgcagccgctaccggctcgccaccatcgccaacttctcggcgctcgggctggagccggggcgcgacgtggacctggggcagctggagcaggagagctgcctggatggctgggagttcagccaggacgtctacctgtccaccgtcgtgaccgagtggaatctggtgtgtgaggacaactggaaggtgcccctcaccacctccctgttcttcgtaggcgtgctcctcggctccttcgtgtccgggcagctgtcagacaggtttggcaggaagaacgttctcttcgcaaccatggctgtacagactggcttcagcttcctgcagattttctccatcagctgggagatgttcactgtgttatttgtcatcgtgggcatgggccagatctccaactatgtggtagccttcatactaggaacagaaattcttggcaagtcagttcgtattatattctctacattaggagtgtgcacattttttgcagttggctatatgctgctgccactgtttgcttacttcatcagagactggcggatgctgctgctggcgctgacggtgccgggagtgctgtgtgtcccgctgtggtggttcattcctgaatctccccgatggctgatatcccagagaagatttagagaggctgaagatatcatccaaaaagctgcaaaaatgaacaacatagctgtaccagcagtgatatttgattctgtggaggagctaaatcccctgaagcagcagaaagctttcattctggacctgttcaggactcggaatattgccataatgaccattatgtctttgctgctatggatgctgacctcagtgggttactttgctctgtctctggatgctcctaatttacatggagatgcctacctgaactgtttcctctctgccttgattgaaattccagcttacattacagcctggctgctattgcgaaccctgcccaggcgttatatcatagctgcagtactgttctggggaggaggtgtgcttctcttcattcaactggtacctgtggattattacttcttatccattggtctggtcatgctgggaaaatttgggatcacctctgctttctccatgctgtatgtcttcactgctgagctctacccaaccctggtcaggaacatggcggtgggggtcacatccacggcctccagagtgggcagcatcattgccccctactttgtttacctcggtgcttacaacagaatgctgccctacatcgtcatgggtagtctgactgtcctgattggaatcctcaccctttttttccctgaaagtttgggaatgactcttccagaaaccttagagcagatgcagaaagtgaaatggttcagatctgggaaaaaaacaagagactcaatggagacagaagaaaatcccaaggttctaataactgcattctgaaaaaatatctaccccatttggtgaagtgaaaaacagaaaaataagaccctgtggagaaattcgttgttcccactgaaatggactgactgtaacgattgacaccaaaatgaaccttgctatcaagaaatgctcgtcatacagtaaactctggatgattcttccagataatgtccttgctttacaaaccaaccatttctagagagtctccttactcattaattcaatgaaatggattggtaagatgtcttgaaaacatgttagtcaaggactggtaaaatacatataaagattaacactcatttccaatcatacaaatactatccaaataaaaataacatcattgtattaacgcaaa

SEQ ID NO: 118 - DNA, 1935 bp, Homo sapiens
agacttgcttctgagcggaaactgaaagtgaaatagggagctggctaccagcgttgagtcccctgtaaagccaaaccccctaaaggtctccacactgctgtttaacggcacacttgacaatggcttcagcagcacgcttgacaatgatgtgggaggaggtcacatgccctatctgcctggaccccttcgtggagcctgtgagcatcgagtgtggccacagcttctgccaggaatgcatctctcaggttgggaaaggtgggggcagcgtctgtcctgtgtgccggcagcgctttctgctcaagaatctccggcccaatcgacagctagccaacatggtgaacaaccttaaagaaatcagccaggaggccagagagggcacacagggggaacggtgtgcagtgcatggagagagacttcacctgttctgtgagaaagatgggaaggccctttgctgggtatgtgcccagtctcggaaacaccgtgaccacgccatggtccctcttgaggaggctgcacaggagtaccaggagaagctccaggtggcattaggggaactgagaagaaagcaggagttggctgagaagttggaagtggaaattgcaataaagagagcagactggaagaaaacagtggaaacacagaaatctaggattcacgcagagtttgtgcagcaaaaaaacttcctggttgaagaagaacagaggcagctgcaggagctggagaaggatgagagggagcagctgagaatcctgggggagaaagaggccaagctggcccagcagagccaggccctacaggagctcatctcagagctagatcgaaggtgccacagctcagcactggaactgctgcaggaggtgataattgtcctggaaaggagtgagtcctggaacctgaaggacctggatattacctctccagaactcaggagtgtgtgccatgtgccagggctgaagaagatgctgaggacatgtgcagtccacatcactctggatccagacacagccaatccgtggctgatactttcagaagatcggagacaagtgaggcttggagacacccagcagagcatacctggaaatgaagagagatttgatagttatcctatggtcctgggtgcccagcactttcactctggaaaacattactgggaggtagatgtgacaggaaaggaggcctgggacctgggtgtctgcagagactctgtgcgcaggaaggggcactttttgcttagttccaagagtggcttctggacaatttggttgtggaacaaacaaaaatatgaggctggcacctacccccagactcccctccaccttcaggtgcctccatgccaagttgggattttcctggactatgaggctggcatggtctccttctacaacatcactgaccatggctccctcatctactccttctctgaatgtgcctttacaggacctctgcggcccttcttcagtcctggtttcaatgatggaggaaaaaacacagcccctctaaccctctgtccactgaatattggatcacaaggatccactgactattgatggctttctctggacactgccactctccccattggcaccgcttctcagccacaaaccctgcctcttttccccatgaactctgaaccacctttgtctctgcagaggcatccggatcccagcaagcgagctttagcagggaagtcacttcaccatcaacattcctgccccagatggctttgtgattccctccagtgaagcagcctccttatatttggcccaaactcatcttgatcaaccaaaaacatgtttctgccttctttatgggacttaagttttttttttctcctctccatctctaggatgtcgtctttggtgagatctctattatatcttgtatggtttgcaaaagggcttcctaaaaataaaaaataaaatttaaaaaactgtg

SEQ ID NO: 119 - DNA, 769 bp, Homo sapiens
gccatcgccgcagatccagcgcccagagagacaccagagaacccaccatggccccctttgagcccctggcttctggcatcctgttgttgctgtggctgatagcccccagcagggcctgcacctgtgtcccaccccacccacagacggccttctgcaattccgacctcgtcatcagggccaagttcgtggggacaccagaagtcaaccagaccaccttataccagcgttatgagatcaagatgaccaagatgtataaagggttccaagccttaggggatgccgctgacatccggttcgtctacacccccgccatggagagtgtctgcggatacttccacaggtcccacaaccgcagcgaggagtttctcattgctggaaaactgcaggatggactcttgcacatcactacctgcagttttgtggctccctggaacagcctgagcttagctcagcgccggggcttcaccaagacctacactgttggctgtgaggaatgcacagtgtttccctgtttatccatcccctgcaaactgcagagtggcactcattgcttgtggacggaccagctcctccaaggctctgaaaagggcttccagtcccgtcaccttgcctgcctgcctcgggagccagggctgtgcacctggcagtccctgcggtcccagatagcctgaatcctgcccggagtggaagctgaagcctgcacagtgtccaccctgttcccactcccatctttcttccggacaatgaaataaagagttaccacccagca

SEQ ID NO: 120 - DNA, 1431 bp, Homo sapiens
ggcttactgcgggacggccttggagagtactcgggttcgtgaacttcccggaggcgcaatgagctgcattaacctgcccactgtgctgcctggctcccccagcaagacccgggggcagatccaggtgattctcgggccgatgttctcaggaaaaagcacagagttgatgagacgcgtccgtcgcttccagattgctcagtacaagtgcctggtgatcaagtatgccaaagacactcgctacagcagcagcttctgcacacatgaccggaacaccatggaggcactgcccgcctgcctgctccgagacgtggcccaggaggccctgggcgtggctgtcataggcatcgacgaggggcagtttttccctgacatcgtggagttctgcgaggccatggccaacgccgggaagaccgtaattgtggctgcactggatgggaccttccagaggaagccatttggggccatcctgaacctggtgccgctggccgagagcgtggtgaagctgacggcggtgtgcatggagtgcttccgggaagccgcctataccaagaggctcggcacagagaaggaggtcgaggtgattgggggagcagacaagtaccactccgtgtgtcggctctgctacttcaagaaggcctcaggccagcctgccgggccggacaacaaagagaactgcccagtgccaggaaagccaggggaagccgtggctgccaggaagctctttgccccacagcagattctgcaatgcagccctgccaactgagggacctgcgagggccgcccgctcccttcctgccactgccgcctactggacgctgccctgcatgctgcccagccactccaggaggaagtcgggaggcgtggagggtgaccacaccttggccttctgggaactctcctttgtgtggctgccccacctgccgcatgctccctcctctcctacccactggtctgcttaaagcttccctctcagctgctgggacgatcgcccaggctggagctggccccgcttggtggcctgggatctggcacactccctctccttggggtgagggacagagccccacgctgttgacatcagcctgcttcttcccctctgcggctttcactgctgagtttctgttctccctgggaagcctgtgccagcacctttgagccttggcccacactgaggcttaggcctctctgcctgggatgggctcccaccctcccctgaggatggcctggattcacgccctcttgtttccttttgggctcaaagcccttcctacctctggtgatggtttccacaggaacaacagcatctttcaccaagatgggtggcaccaaccttgctgggacttggatcccaggggcttatctcttcaagtgtggagagggcagggtccacgcctctgctgtagcttatgaaattaactaattgaaaattca

SEQ ID NO: 121 - DNA, 2782 bp, Homo sapiens
agtgggcggaccgcgcggctggaggtgtgaggatccgaacccaggggtggggggtggaggcggctcctgcgatcgaaggggacttgagactcaccggccgcacgccatgagggccctgtgggtgctgggcctctgctgcgtcctgctgaccttcgggtcggtcagagctgacgatgaagttgatgtggatggtacagtagaagaggatctgggtaaaagtagagaaggatcaaggacggatgatgaagtagtacagagagaggaagaagctattcagttggatggattaaatgcatcacaaataagagaacttagagagaagtcggaaaagtttgccttccaagccgaagttaacagaatgatgaaacttatcatcaattcattgtataaaaataaagagattttcctgagagaactgatttcaaatgcttctgatgctttagataagataaggctaatatcactgactgatgaaaatgctctttctggaaatgaggaactaacagtcaaaattaagtgtgataaggagaagaacctgctgcatgtcacagacaccggtgtaggaatgaccagagaagagttggttaaaaaccttggtaccatagccaaatctgggacaagcgagtttttaaacaaaatgactgaagcacaggaagatggccagtcaacttctgaattgattggccagtttggtgtcggtttctattccgccttccttgtagcagataaggttattgtcacttcaaaacacaacaacgatacccagcacatctgggagtctgactccaatgaattttctgtaattgctgacccaagaggaaacactctaggacggggaacgacaattacccttgtcttaaaagaagaagcatctgattaccttgaattggatacaattaaaaatctcgtcaaaaaatattcacagttcataaactttcctatttatgtatggagcagcaagactgaaactgttgaggagcccatggaggaagaagaagcagccaaagaagagaaagaagaatctgatgatgaagctgcagtagaggaagaagaagaagaaaagaaaccaaagactaaaaaagttgaaaaaactgtctgggactgggaacttatgaatgatatcaaaccaatatggcagagaccatcaaaagaagtagaagaagatgaatacaaagctttctacaaatcattttcaaaggaaagtgatgaccccatggcttatattcactttactgctgaaggggaagttaccttcaaatcaattttatttgtacccacatctgctccacgtggtctgtttgacgaatatggatctaaaaagagcgattacattaagctctatgtgcgccgtgtattcatcacagacgacttccatgatatgatgcctaaatacctcaattttgtcaagggtgtggtggactcagatgatctccccttgaatgtttcccgcgagactcttcagcaacataaactgcttaaggtgattaggaagaagcttgttcgtaaaacgctggacatgatcaagaagattgctgatgataaatacaatgatactttttggaaagaatttggtaccaacatcaagcttggtgtgattgaagaccactcgaatcgaacacgtcttgctaaacttcttaggttccagtcttctcatcatccaactgacattactagcctagaccagtatgtggaaagaatgaaggaaaaacaagacaaaatctacttcatggctgggtccagcagaaaagaggctgaatcttctccatttgttgagcgacttctgaaaaagggctatgaagttatttacctcacagaacctgtggatgaatactgtattcaggcccttcccgaatttgatgggaagaggttccagaatgttgccaaggaaggagtgaagttcgatgaaagtgagaaaactaaggagagtcgtgaagcagttgagaaagaatttgagcctctgctgaattggatgaaagataaagcccttaaggacaagattgaaaaggctgtggtgtctcagcgcctgacagaatctccgtgtgctttggtggccagccagtacggatggtctggcaacatggagagaatcatgaaagcacaagcgtaccaaacgggcaaggacatctctacaaattactatgcgagtcagaagaaaacatttgaaattaatcccagacacccgctgatcagagacatgcttcgacgaattaaggaagatgaagatgataaaacagttttggatcttgctgtggttttgtttgaaacagcaacgcttcggtcagggtatcttttaccagacactaaagcatatggagatagaatagaaagaatgcttcgcctcagtttgaacattgaccctgatgcaaaggtggaagaagagcccgaagaagaacctgaagagacagcagaagacacaacagaagacacagagcaagacgaagatgaagaaatggatgtgggaacagatgaagaagaagaaacagcaaaggaatctacagctgaaaaagatgaattgtaaattatactctcaccatttggatcctgtgtggagagggaatgtgaaatttacatcatttctttttgggagagacttgttttggatgccccctaatccccttctcccctgcactgtaaaatgtgggattatgggtcacaggaaaaagtgggttttttagttgaattttttttaacattcctcatgaatgtaaatttgtactatttaactgactattcttgatgtaaaatcttgtcatgtgtataaaaataaaaaagatcccaaata

SEQ ID NO: 122 - DNA, 1747 bp, Homo sapiens
agcctgacttcagcgctcccactctcggccgacacccctcatggccaaccgttacaccatggatctgactgccatctacgagagcctcctgtcgctgagccctgacgtgcccgtgccatccgaccatggagggactgagtccagcccaggctggggctcctcgggaccctggagcctgagcccctccgactccagcccgtctggggtcacctcccgcctgcctggccgctccaccagcctagtggagggccgcagctgtggctgggtgcccccaccccctggcttcgcaccgctggctccccgcctgggccctgagctgtcaccctcacccacttcgcccactgcaacctccaccaccccctcgcgctacaagactgagctatgtcggaccttctcagagagtgggcgctgccgctacggggccaagtgccagtttgcccatggcctgggcgagctgcgccaggccaatcgccaccccaaatacaagacggaactctgtcacaagttctacctccagggccgctgcccctacggctctcgctgccacttcatccacaaccctagcgaagacctggcggccccgggccaccctcctgtgcttcgccagagcatcagcttctccggcctgccctctggccgccggacctcaccaccaccaccaggcctggccggcccttccctgtcctccagctccttctcgccctccagctccccaccaccacctggggaccttccactgtcaccctctgccttctctgctgcccctggcacccccctggctcgaagagaccccaccccagtctgttgcccctcctgccgaagggccactcctatcagcgtctgggggcccttgggtggcctggttcggaccccctctgtacagtccctgggatccgaccctgatgaatatgccagcagcggcagcagcctggggggctctgactctcccgtcttcgaggcgggagtttttgcaccaccccagcccgtggcagccccccggcgactccccatcttcaatcgcatctctgtttctgagtgacaaagtgactgcccggtcagatcagctggatctcagcggggagccacgtctcttgcactgtggtctctgcatggaccccagggctgtggggacttgggggacagtaatcaagtaatccccttttccagaatgcattaacccactcccctgacctcacgctggggcaggtccccaagtgtgcaagctcagtattcatgatggtgggggatggagtgtcttccgaggttcttgggggaaaaaaaattgtagcatatttaagggaggcaatgaaccctctcccccacctcttccctgcccaaatctgtctcctagaatcttatgtgctgtgaataataggccttcactgcccctccagtttttatagacctgaggttccagtgtctcctggtaactggaacctctcctgagggggaatcctggtgctcaaattaccctccaaaagcaagtagccaaagccgttgccaaaccccacccataaatcaatgggccctttatttatgacgactttatttattctaatatgattttatagtatttatatatattgggtcgtctgcttcccttgtatttttcttcctttttttgtaatattgaaaacgacgatataattattataagtagactataatatatttagtaatatatattattaccttaaaagtctatttttgtgttttgggcatttttaaataaacaatctgagtgtaa

SEQ ID NO: 123 - DNA, 533 bp, Homo sapiens
gactttcccgatcgccaggcaggagtttctctcggtgactactatcgctgtcatgtctggtcgtggcaagcaaggaggcaaggcccgcgccaaggccaagtcgcgctcgtcccgcgctggccttcagttcccggtagggcgagtgcatcgcttgctgcgcaaaggcaactacgcggagcgagtgggggccggcgcgcccgtctacatggctgcggtcctcgagtatctgaccgccgagatcctggagctggcgggcaacgcggctcgggacaacaagaagacgcgcatcatccctcgtcacctccagctggccatccgcaacgacgaggaactgaacaagctgctgggcaaagtcaccatcgcccagggcggcgtcttgcctaacatccaggccgtactgctccctaagaagacggagagtcaccacaaggcaaagggcaagtgaggctgacgtccggcccaagtgggcccagcccggcccgcgtctcgaaggggcacctgtgaactcaaaaggctcttttcagagccaccca

SEQ ID NO: 124 - DNA, 2224 bp, Homo sapiens
acttcttttcttggctaagccgcgtttgtactgtgtcttaccatgcctgaaccggcaaaatccgctccggcccctaaaaagggctccaagaaagccgtcaccaaagcccagaagaaagacggcaagaagcgcaagcgcagccgcaaagagagctactccatctacgtgtacaaggtgctgaagcaggtccaccccgacaccggcatctcgtccaaggccatgggcatcatgaactccttcgtcaacgacatcttcgagcgcatcgcgggagaggcttcccgcctggcgcactacaacaagcgctccaccatcacatcccgcgagatccagacggccgtgcgcctgctgctgcccggcgagctggccaagcacgccgtgtccgagggcaccaaggcggtcaccaagtacaccagctccaagtgagtccctgccgggacctggcgctcgctcgctcgagtcgccggctgcttgactccaaaggctcttttcagagccacccacctaatcactagaaaagagcttgttcacttattcccttagtttcttttcataaagtaagttattttagtgtgaaggtcatgggaaatggcatacgtagctttttaactatttggaactcgaggtccccagtgcgtcattggatttgcttttgaatctagagcgtgtctttactcattgtgctgcttagccttcccaggagtcggttctcaattaggctgttgggaatccgcctctttacccgcccccactcccgccccacacgcgccctggtggctccttgggtctgtttcattctaaaacgaagtggctgagttcggctgtcatttaagagaactccaggacacaattcagcccgggttccgcaaacactgcgtgacagctctgtatgactgacgcttggcagcagcttttgtgtccggtcaccagttctgccgtgcgatggggcctcctgtggataccagccgttctgtgtattttggacgaaggccgcgcagccgggtcccagccttgtcctgattgggcgacaagaatattcaaaattctgcgcctttttctaatttgtagatttcagtttccgtcgttcactttgagactttgaaattcctatttctcattttgttgataatttctgcatttaatggtctgtgctttaaatggtaacgctacggccccaggtcactgcgaggcacttaccatgtagatacgggctcaaaagtcacctctcagagacctacgtcatccactcaggaattcgcgcctctcatacttgcctgtctcattttatcttccttctagcagctgtctgaaattggttcgtctgttttcttgtttatggtattctcaagcccttgacagaccggctagtgtggttttcccgtgcatcttcagcctggcacattatggacacttaaatactacgtattgatctaatattgttgggttaatttttccatcccacccttttcttaatcgcttccgtggatggatgaagggtgctgttcatttccattagatgtatgtgaaggcacagtgaaaatggaaatgttcttggagctacttcctcaaaatgtatccttagtcacctcagtgcaacagctgggagggggccgtgttaagattttttttgctacaaagaggaggtggcaatggtagatccacccttatgcttctcagtttagcataacctcttatggattttcatcaaattcagcgtgttggtcactggaaagagccttttccttctccttttcttactctcccctcatggtgttcccctcttaaaggagaggagcttttaatttacacttaccacctcatttgcttttctggaggccatgcaatataggcgggactacagagttaatctcctttttacaaatgaggccaagagaagcctcattggttcacagtcatgcagctcatactgtccacccttgtattctcagatgcaggacaattgcattttagttttattttgtggaggtgcagaatatttactctttctgtccaacccttgattctgccgaggaagacactgatggtttgatgagtgattcagctgtttttggctaagggcttttggagctgatggcaggggtttgatgaatccaaatgagctctagacattatcacagactgaatagatcttaactgtctcctacatgtgtgttttcaaatgtgtatagatgctattgttattaataaagttaccaattaatttaaa

SEQ ID NO: 125 - DNA, 409 bp, Homo sapiens
aggtttcttaagttggttttagaagttgcttagtcatgtctggccgtggtaaaggtggaaaaggtttgggtaagggaggagctaagcgtcatcgcaaggttttgcgcgataacatccagggcatcactaagccagctatccggcgccttgctcgtcgcggcggtgtcaagcgaatttctggccttatctatgaggagactcgtggtgttctgaaggtgttcctggagaacgtgattcgtgacgctgtcacttacacagagcacgccaaacgcaagaccgtgacagcaatggatgtggtctacgcgctgaagcgacagggacgcactctttacggcttcggtggctaaggctcctgcttgctgcactcttattttcattttcaaccaaaggcccttttcagggccgccca

SEQ ID NO: 126 - DNA, 668 bp, Homo sapiens
gaaacgacaggggaaaggaggtctcactgagcaccgtcccagcatccggacaccacagcggcccttcgctccacgcagaaaaccacacttctcaaaccttcactcaacacttccttccccaaagccagaagatgcacaaggaggaacatgaggtggctgtgctgggggcaccccccagcaccatccttccaaggtccaccgtgatcaacatccacagcgagacctccgtgcccgaccatgtcgtctggtccctgttcaacaccctcttcttgaactggtgctgtctgggcttcatagcattcgcctactccgtgaagtctagggacaggaagatggttggcgacgtgaccggggcccaggcctatgcctccaccgccaagtgcctgaacatctgggccctgattctgggcatcctcatgaccattggattcatcctgttactggtattcggctctgtgacagtctaccatattatgttacagataatacaggaaaaacggggttactagtagccgcccatagcctgcaacctttgcactccactgtgcaatgctggccctgcacgctggggctgttgcccctgcccccttggtcctgcccctagatacagcagtttatacccacacacctgtctacagtgtcattcaataaagtgcacgtgcttgtga

SEQ ID NO: 127 - DNA, 2103 bp, Homo sapiens
tgactagacggccagcctgttaaggtggccccagatattccagcctcagcccagagtcctcctgtgcccctactgcagcaagggtgtctccaagaagggggacctggagtcagcccgtcacacctggtttcctctctgctagggtccctcctcccacagagcactggagggcagctgaggaggagctaccttaaaaaaggaggtgtgtgccagggagctgggtaggagcctggctatatatctgcccagcagcggtactctcgggacagagatggcactgatgcaggaactgtatagcacaccagcctccaggctggactccttcgtggctcagtggctgcagccccaccgggagtggaaggaagaggtgctagacgctgtgcggaccgtggaggagtttctgaggcaggagcatttccaggggaagcgtgggctggaccaggatgtgcgggtgctgaaggtagtcaaggtgggctccttcgggaatggcacggttctcaggagcaccagagaggtggagctggtggcgtttctgagctgtttccacagcttccaggaggcagccaagcatcacaaagatgttctgaggctgatatggaaaaccatgtggcaaagccaggacctgctggacctcgggctcgaggacctgaggatggagcagagagtccccgatgctctcgtcttcaccatccagaccagggggactgcggagcccatcacggtcaccattgtgcctgcctacagagccctggggccttctcttcccaactcccagccaccccctgaggtctatgtgagcctgatcaaggcctgcggtggtcctggaaatttctgcccatccttcagcgagctgcagagaaatttcgtgaaacatcggccaactaagctgaagagcctcctgcgcctggtgaaacactggtaccagcagtatgtgaaagccaggtcccccagagccaatctgccccctctctatgctcttgaacttctaaccatctatgcctgggaaatgggtactgaagaagacgagaatttcatgttggacgaaggcttcaccactgtgatggacctgctcctggagtatgaagtcatctgtatctactggaccaagtactacacactccacaatgcaatcattgaggattgtgtcagaaaacagctcaaaaaagagaggcccatcatcctggatccggccgaccccaccctcaacgtggcagaagggtacagatgggacatcgttgctcagagggcctcccagtgcctgaaacaggactgttgctatgacaacagggagaaccccatctccagctggaacgtgaagagggcacgagacatccacttgacagtggagcagaggggttacccagatttcaacctcatcgtgaacccttatgagcccataaggaaggttaaagagaaaatccggaggaccaggggctactctggcctgcagcgtctgtccttccaggttcctggcagtgagaggcagcttctcagcagcaggtgctccttagccaaatatgggatcttctcccacactcacatctatctgctggagaccatcccctccgagatccaggtcttcgtgaagaatcctgatggtgggagctacgcctatgccatcaaccccaacagcttcatcctgggtctgaagcagcagattgaagaccagcaggggcttcctaaaaagcagcagcagctggaattccaaggccaagtcctgcaggactggttgggtctggggatctatggcatccaagacagtgacactctcatcctctcgaagaagaaaggagaggctctgtttccagccagttagttttctctgggagacttctctgtacatttctgccatgtactccagaactcatcctgtcaatcactctgtcccattgtctactgggaaggtcccaggtcttcaccagttttacaatgagttatcccaggccagacgtggtagctcacacctgtaatcccagaactttgggaggccgaggtgggaggagcgcttgagccgaggagttcaagaccagcctgggtatcacagggagaccccgtctctacaaaataaaaaaataattcactgggaaaaaaaaaaaaaaaaaa

SEQ ID NO: 128 - DNA, 1186 bp, Homo sapiens
aaacatttgctagtcagacaagtgacagggaatggattccaaacaccagtgtgtaaagctaaatgatggccacttcatgcctgtattgggatttggcacctatgcacctccagaggttccgagaagtaaagctttggaggtcacaaaattagcaatagaagctgggttccgccatatagattctgctcatttatacaataatgaggagcaggttggactggccatccgaagcaagattgcagatggcagtgtgaagagagaagacatattctacacttcaaagctttggtccacttttcatcgaccagagttggtccgaccagccttggaaaactcactgaagaaagctcaattggactatgttgacctctatcttattcattctccaatgtctctaaagccaggtgaggaactttcaccaacagatgaaaatggaaaagtaatatttgacatagtggatctctgtaccacctgggaggccatggagaagtgtaaggatgcaggattggccaagtccattggggtgtcaaacttcaaccgcaggcagctggagatgatcctcaacaagccaggactcaagtacaagcctgtctgcaaccaggtagaatgtcatccgtatttcaaccggagtaaattgctagatttctgcaagtcgaaagatattgttctggttgcctatagtgctctgggatctcaacgagacaaacgatgggtggacccgaactccccggtgctcttggaggacccagtcctttgtgccttggcaaaaaagcacaagcgaaccccagccctgattgccctgcgctaccagctgcagcgtggggttgtggtcctggccaagagctacaatgagcagcgcatcagacagaacgtgcaggtttttgagttccagttgactgcagaggacatgaaagccatagatggcctagacagaaatctccactattttaacagtgatagttttgctagccaccctaattatccatattcagatgaatattaacatggagggctttgcctgatgtctaccagaagccctgtgtgtggatggtgacgcagaggacgtctctatgccggtgactggacatatcacctctacttaaatccgtcctgtttagcgacttcagtcaactacagctgagtccataggccagaaagacaataaatttttatcattttgaaataa

SEQ ID NO: 129 - DNA, 1377 bp, Homo sapiens
ctctccccggcccgatccgcccgccggctccccctcccccgatccctcgggtcccgggatgggggggcggtgaggcaggcacagccccccgcccccatggccgcccgtcggagccagaggcggagggggcgccggggggagccgggcaccgccctgctggtcccgctcgcgctgggcctgggcctggcgctggcctgcctcggcctcctgctggccgtggtcagtttggggagccgggcatcgctgtccgcccaggagcctgcccaggaggagctggtggcagaggaggaccaggacccgtcggaactgaatccccagacagaagaaagccaggatcctgcgcctttcctgaaccgactagttcggcctcgcagaagtgcacctaaaggccggaaaacacgggctcgaagagcgatcgcagcccattatgaagttcatccacgacctggacaggacggagcgcaggcaggtgtggacgggacagtgagtggctgggaggaagccagaatcaacagctccagccctctgcgctacaaccgccagatcggggagtttatagtcacccgggctgggctctactacctgtactgtcaggtgcactttgatgaggggaaggctgtctacctgaagctggacttgctggtggatggtgtgctggccctgcgctgcctggaggaattctcagccactgcggcgagttccctcgggccccagctccgcctctgccaggtgtctgggctgttggccctgcggccagggtcctccctgcggatccgcaccctcccctgggcccatctcaaggctgcccccttcctcacctacttcggactcttccaggttcactgaggggccctggtctccccgcagtcgtcccaggctgccggctcccctcgacagctctctgggcacccggtcccctctgccccaccctcagccgctctttgctccagacctgcccctccctctagaggctgcctgggcctgttcacgtgttttccatcccacataaatacagtattcccactcttatcttacaactcccccaccgcccactctccacctcactagctccccaatccctgaccctttgaggcccccagtgatctcgactcccccctggccacagacccccagggcattgtgttcactgtactctgtgggcaaggatgggtccagaagaccccacttcaggcactaagaggggctggacctggcggcaggaagccaaagagactgggcctaggccaggagttcccaaatgtgaggggcgagaaacaagacaagctcctcccttgagaattccctgtggatttttaaaacagatattatttttattattattgtgacaaaatgttgataaatggatattaaatagaa

SEQ ID NO: 130 - DNA, 1876 bp, Homo sapiens
gaccggctgcctggctgacttacagcagtcagactctgacaggatcatggctatgatggaggtccaggggggacccagcctgggacagacctgcgtgctgatcgtgatcttcacagtgctcctgcagtctctctgtgtggctgtaacttacgtgtactttaccaacgagctgaagcagatgcaggacaagtactccaaaagtggcattgcttgtttcttaaaagaagatgacagttattgggaccccaatgacgaagagagtatgaacagcccctgctggcaagtcaagtggcaactccgtcagctcgttagaaagatgattttgagaacctctgaggaaaccatttctacagttcaagaaaagcaacaaaatatttctcccctagtgagagaaagaggtcctcagagagtagcagctcacataactgggaccagaggaagaagcaacacattgtcttctccaaactccaagaatgaaaaggctctgggccgcaaaataaactcctgggaatcatcaaggagtgggcattcattcctgagcaacttgcacttgaggaatggtgaactggtcatccatgaaaaagggttttactacatctattcccaaacatactttcgatttcaggaggaaataaaagaaaacacaaagaacgacaaacaaatggtccaatatatttacaaatacacaagttatcctgaccctatattgttgatgaaaagtgctagaaatagttgttggtctaaagatgcagaatatggactctattccatctatcaagggggaatatttgagcttaaggaaaatgacagaatttttgtttctgtaacaaatgagcacttgatagacatggaccatgaagccagtttttttggggcctttttagttggctaactgacctggaaagaaaaagcaataacctcaaagtgactattcagttttcaggatgatacactatgaagatgtttcaaaaaatctgaccaaaacaaacaaacagaaaacagaaaacaaaaaaacctctatgcaatctgagtagagcagccacaaccaaaaaattctacaacacacactgttctgaaagtgactcacttatcccaagagaatgaaattgctgaaagatctttcaggactctacctcatatcagtttgctagcagaaatctagaagactgtcagcttccaaacattaatgcaatggttaacatcttctgtctttataatctactccttgtaaagactgtagaagaaagagcaacaatccatctctcaagtagtgtatcacagtagtagcctccaggtttccttaagggacaacatccttaagtcaaaagagagaagaggcaccactaaaagatcgcagtttgcctggtgcagtggctcacacctgtaatcccaacattttgggaacccaaggtgggtagatcacgagatcaagagatcaagaccatagtgaccaacatagtgaaaccccatctctactgaaagtacaaaaattagctgggtgtgttggcacatgcctgtagtcccagctacttgagaggctgaggcaagagaattgtttgaacccgggaggcagaggttgcagtgtggtgagatcatgccactacactccagcctggcgacagagcgagacttggtttcaaaaaaaaaaaaaaaaaaaacttcagtaagtacgtgttatttttttcaataaaattctattacagtatgtcatgtttgctgtagtgctcatatttattgttgtttttgttttagtactcacttgtttcataatatcaagattactaaaaatgggggaaaagacttctaatctttttttcataatatctttgacacatattacagaagaaataaatttcttacttttaatttaatatga

SEQ ID NO: 131 - DNA, 1634 bp, Homo sapiens
agtctctcgtcatggaatacgcctctgacgcttcactggaccccgaagccccgtggcctcccgcgccccgcgctcgcgcctgccgcgtactgccttgggccctggtcgcggggctgctgctgctgctgctgctcgctgccgcctgcgccgtcttcctcgcctgcccctgggccgtgtccggggctcgcgcctcgcccggctccgcggccagcccgagactccgcgagggtcccgagctttcgcccgacgatcccgccggcctcttggacctgcggcagggcatgtttgcgcagctggtggcccaaaatgttctgctgatcgatgggcccctgagctggtacagtgacccaggcctggcaggcgtgtccctgacggggggcctgagctacaaagaggacacgaaggagctggtggtggccaaggctggagtctactatgtcttctttcaactagagctgcggcgcgtggtggccggcgagggctcaggctccgtttcacttgcgctgcacctgcagccactgcgctctgctgctggggccgccgccctggctttgaccgtggacctgccacccgcctcctccgaggctcggaactcggccttcggtttccagggccgcttgctgcacctgagtgccggccagcgcctgggcgtccatcttcacactgaggccagggcacgccatgcctggcagcttacccagggcgccacagtcttgggactcttccgggtgacccccgaaatcccagccggactcccttcaccgaggtcggaataacgtccagcctgggtgcagcccacctggacagagtccgaatcctactccatccttcatggagacccctggtgctgggtccctgctgctttctctacctcaaggggcttggcaggggtccctgctgctgacctccccttgaggaccctcctcacccactccttccccaagttggaccttgatatttattctgagcctgagctcagataatatattatatatattatatatatatatatatttctatttaaagaggatcctgagtttgtgaatggacttttttagaggagttgttttgggggggggggggtcttcgacattgccgaggctggtcttgaactcctggacttagacgatcctcctgcctcagcctcccaagcaactgggattcatcctttctattaattcattgtacttatttgcttatttgtgtgtattgagcatctgtaatgtgccagcattgtgcccaggctagggggctatagaaacatctagaaatagactgaaagaaaatctgagttatggtaatacgtgaggaatttaaagactcatccccagcctccacctcctgtgtgatacttgggggctagcttttttctttctttcttttttttgagatggtcttgttctgtcaaccaggctagaatgcagcggtgcaatcatgagtcaatgcagcctccagcctcgacctcccgaggctcaggtgatcctcccatctcagcctctcgagtagctgggaccacagttgtgtgccaccacacttggctaactttttaatttttttgcggagacggtattgctatgttgccaaggttgtttacatgccagtacaatttataataaacactcatttttcctccc

SEQ ID NO: 132 - DNA, 2516 bp, Homo sapiens
ctttcgcggcgctacggcgttggcaccagtctctagaaaagaagtcagctctggttcggagaagcagcggctggcgtgggccatccggggaatgggcgccctcgtgacctagtgttgcggggcaaaaagggtcttgccggcctcgctcgtgcaggggcgtatctgggcgcctgagcgcggcgtgggagccttgggagccgccgcagcagggggcacacccggaaccggcctgagcgcccgggaccatgaacggggaggccatctgcagcgccctgcccaccattccctaccacaaactcgccgacctgcgctacctgagccgcggcgcctctggcactgtgtcgtccgcccgccacgcagactggcgcgtccaggtggccgtgaagcacctgcacatccacactccgctgctcgacagtgaaagaaaggatgtcttaagagaagctgaaattttacacaaagctagatttagttacattcttccaattttgggaatttgcaatgagcctgaatttttgggaatagttactgaatacatgccaaatggatcattaaatgaactcctacataggaaaactgaatatcctgatgttgcttggccattgagatttcgcatcctgcatgaaattgcccttggtgtaaattacctgcacaatatgactcctcctttacttcatcatgacttgaagactcagaatatcttattggacaatgaatttcatgttaagattgcagattttggtttatcaaagtggcgcatgatgtccctctcacagtcacgaagtagcaaatctgcaccagaaggagggacaattatctatatgccacctgaaaactatgaacctggacaaaaatcaagggccagtatcaagcacgatatatatagctatgcagttatcacatgggaagtgttatccagaaaacagccttttgaagatgtcaccaatcctttgcagataatgtatagtgtgtcacaaggacatcgacctgttattaatgaagaaagtttgccatatgatatacctcaccgagcacgtatgatctctctaatagaaagtggatgggcacaaaatccagatgaaagaccatctttcttaaaatgtttaatagaacttgaaccagttttgagaacatttgaagagataacttttcttgaagctgttattcagctaaagaaaacaaagttacagagtgtttcaagtgccattcacctatgtgacaagaagaaaatggaattatctctgaacatacctgtaaatcatggtccacaagaggaatcatgtggatcctctcagctccatgaaaatagtggttctcctgaaacttcaaggtccctgccagctcctcaagacaatgattttttatctagaaaagctcaagactgttattttatgaagctgcatcactgtcctggaaatcacagttgggatagcaccatttctggatctcaaagggctgcattctgtgatcacaagaccactccatgctcttcagcaataataaatccactctcaactgcaggaaactcagaacgtctgcagcctggtatagcccagcagtggatccagagcaaaagggaagacattgtgaaccaaatgacagaagcctgccttaaccagtcgctagatgcccttctgtccagggacttgatcatgaaagaggactatgaacttgttagtaccaagcctacaaggacctcaaaagtcagacaattactagacactactgacatccaaggagaagaatttgccaaagttatagtacaaaaattgaaagataacaaacaaatgggtcttcagccttacccggaaatacttgtggtttctagatcaccatctttaaatttacttcaaaataaaagcatgtaagtgactgtttttcaagaagaaatgtgtttcataaaaggatatttatatctctgttgctttgactttttttatataaaatccgtgagtattaaagctttattgaaggttctttgggtaaatattagtctccctccatgacactgcagtattttttttaattaatacaagtaaaaagtttgaattttgctacatagttcaatttttatgtctcttttgttaacagaaaccacttttaaaggatagtaattattcttgtttataacagtgccttaaggtatgatgtatttctgatggaagccattttcacattcatgttcttcatggattatttgttacttgtctaagatgcaatttgattttatgaagtatataccctttacccaccagagacagtacagaatccctgccctaaaatcccaggcttaattgccctacaaagggttattaatttaaaactccattattaggattacattttaaagttttatttatgaattccctttaaaaatgatatttcaaaggtaaaacaatacaatataaagaaaaaaataaatatattaataccggcttcctgtccccatttttaacctcagccttccctactgtcaccaacaaccaagctaaataaagtcaacagcctgatgtgta

SEQ ID NO: 133 - DNA, 2523 bp, Homo sapiens
gtgcgcgtccacagctctcactcaccctccggcttcctgtcggggctttctcagccccaccccacgtttggacatttggagcatttccttccctgacagccggacctgggactgggctggggccctggcggatggagacatgctgcccctgctgctgctgcccctgctgtggggggggtccctgcaggagaagccagtgtacgagctgcaagtgcagaagtcggtgacggtgcaggagggcctgtgcgtccttgtgccctgctccttctcttacccctggagatcctggtattcctctcccccactctacgtctactggttccgggacggggagatcccatactacgctgaggttgtggccacaaacaacccagacagaagagtgaagccagagacccagggccgattccgcctccttggggatgtccagaagaagaactgctccctgagcatcggagatgccagaatggaggacacgggaagctatttcttccgcgtggagagaggaagggatgtaaaatatagctaccaacagaataagctgaacttggaggtgacagccctgatagagaaacccgacatccactttctggagcctctggagtccggccgccccacaaggctgagctgcagccttccaggatcctgtgaagcgggaccacctctcacattctcctggacggggaatgccctcagccccctggaccccgagaccacccgctcctcggagctcaccctcacccccaggcccgaggaccatggcaccaacctcacctgtcagatgaaacgccaaggagctcaggtgaccacggagagaactgtccagctcaatgtctcctatgctccacagaccatcaccatcttcaggaacggcatagccctagagatcctgcaaaacacctcataccttccggtcctggagggccaggctctgcggctgctctgtgatgctcccagcaacccccctgcacacctgagctggttccagggctcccctgccctgaacgccacccccatctccaataccgggatcttggagcttcgtcgagtaaggtctgcagaagaaggaggcttcacctgccgcgctcagcacccgctgggcttcctgcaaatttttctgaatctctcagtttactccctcccacagttgctgggcccctcctgctcctgggaggctgagggtctgcactgcagatgctcctttcgagcccggccggccccctccctgtgctggcggcttgaggagaagccgctggaggggaacagcagccagggctcattcaaggtcaactccagctcagctgggccctgggccaacagctccctgatcctccacggggggctcagctccgacctcaaagtcagctgcaaggcctggaacatctatgggtcccagagcggctctgtcctgctgctgcaagggagatcgaacctcgggacaggagtggttcctgcagcccttggtggtgctggtgtcatggccctgctctgtatctgtctgtgcctcatcttctttttaatagtgaaagcccgcaggaagcaagcagctgggagaccagagaaaatggatgatgaagaccccattatgggtaccatcacctcgggttccaggaagaagccctggccagacagccccggagatcaagcatctcctcctggggatgcccctcccttggaagaacaaaaggagctccattatgcctcccttagtttttctgagatgaagtcgagggagcctaaggaccaggaggccccaagcaccacggagtactcggagatcaagacaagcaagtgaggatttgcccagagttcagtcctggctggaggagccacagcctgtctgggggaaaggacaagtcagggaccacttgctgaagcacgaagagcccttgtggcaatgttaacattaactgatgtttaagtgctccaagcagatggaattagagaggtgggctcaaatctaggccctggcactgtcatcaagcaattcactgcatccctctgtgcctcagtttcccattctgtaaatcagagatcatgcatgctacctcaaaggttgttgtgaacattaaagaaatcaacacatggaaatcaaccaacatgggtcctggaacagggcgttgtgctcagtgctttctggtctctcttccttgaatagaaaggtcctgctggcaagttctctcaaggctggggatgaccaggcacaaaaaacagggcagcaatatgttggtgtcactccccttcccaaaactcttcgaagactccctaggaaagaccagcccctcagcctggcacttggttcatgatgtgggatcttatatccttgccagagtcatatctttgcccacttttacctgcaatccttgcatcatattcctttggctccagtccttcatttatgagacccataggaatccttccaacagccaaagagttgagtctaactctttcctgcccaaacccattcacggccccctggccttagacaatatatcacaagcatctcccctgacacataaagtc

SEQ ID NO: 134 - DNA, 1237 bp, Homo sapiens
acttggccttacactccgctcggctcaccatgtgtcactctcgcagctgccacccgaccatgaccatcctgcaggccccgaccccggccccctccaccatcccgggaccccggcggggctccggtcctgagatcttcaccttcgaccctctcccggagcccgcagcggcccctgccgggcgccccagcgcctctcgcgggcaccgaaagcgcagccgcagggttctctaccctcgagtggtccggcgccagctgccagtcgaggaaccgaacccagccaaaaggcttctctttctgctgctcaccatcgtcttctgccagatcctgatggctgaagagggtgtgccggcgcccctgcctccagaggacgcccctaacgccgcatccctggcgcccacccctgtgtccgccgtcctcgagccctttaatctgacttcggagccctcggactacgctctggacctcagcactttcctccagcaacacccggccgccttctaactgtgactccccgcactccccaaaaagaatccgaaaaaccacaaagaaacaccaggcgtacctggtgcgcgagagcgtatccccaactgggacttccgaggcaacttgaactcagaacactacagcggagacgccacccggtgcttgaggcgggaccgaggcgcacagagaccgaggcgcatagagaccgaggcacagcccagctggggctaggcccggtgggaaggagagcgtcgttaatttatttcttattgctcctaattaatatttatatgtatttatgtacgtcctcctaggtgatggagatgtgtacgtaatatttattttaacttatgcaagggtgtgagatgttccccctgctgtaaatgcaggtctcttggtatttattgagctttgtgggactggtggaagcaggacacctggaactgcggcaaagtaggagaagaaatggggaggactcgggtgggggaggacgtcccggctgggatgaagtctggtggtgggtcgtaagtttaggaggtgactgcatcctccagcatctcaactccgtctgtctactgtgtgagacttcggcggaccattaggaatgagatccgtgagatccttccatcttcttgaagtcgcctttagggtggctgcgaggtagagggttgggggttggtgggctgtcacggagcgactgtcgagatcgcctagtatgttctgtgaacacaaataaaattgatttactgtctgca

SEQ ID NO: 135 - DNA, 2734 bp, Homo sapiens
ggctccgacttggactccctgctccgctgctgccgcttcggccccgcacgcagccagccgccagccgcccgcccggcccagctcccgccgcggccccttgccgcggtccctctcctggtcccctcccggttggtccgggggtgcgcagggggcagggcgggcgcccaggggaagctcgagggacgcgcgcgcgaaggctcctttgtggacttcacggccgccaacatctgggcgcagcgcgggccaccgctggccgtctcgccgccgcgtcgccttggggacccgagggggctcagccccaaggacggagacttcgattcgggaccagccccccgggatgcggtagcggccgctgtgcggaggccgcgaagcagctgcagccgccgccgcgcagatccacgctggctccgtgcgccatggtcacccacagcaagtttcccgccgccgggatgagccgccccctggacaccagcctgcgcctcaagaccttcagctccaagagcgagtaccagctggtggtgaacgcagtgcgcaagctgcaggagagcggcttctactggagcgcagtgaccggcggcgaggcgaacctgctgctcagtgccgagcccgccggcacctttctgatccgcgacagctcggaccagcgccacttcttcacgctcagcgtcaagacccagtctgggaccaagaacctgcgcatccagtgtgaggggggcagcttctctctgcagagcgatccccggagcacgcagcccgtgccccgcttcgactgcgtgctcaagctggtgcaccactacatgccgccccctggagccccctccttcccctcgccacctactgaaccctcctccgaggtgcccgagcagccgtctgcccagccactccctgggagtccccccagaagagcctattacatctactccgggggcgagaagatccccctggtgttgagccggcccctctcctccaacgtggccactcttcagcatctctgtcggaagaccgtcaacggccacctggactcctatgagaaagtcacccagctgccggggcccattcgggagttcctggaccagtacgatgccccgctttaaggggtaaagggcgcaaagggcatgggtcgggagaggggacgcaggcccctctcctccgtggcacatggcacaagcacaagaagccaaccaggagagagtcctgtagctctggggggaaagagggcggacaggcccctccctctgccctctccctgcagaatgtggcaggcggacctggaatgtgttggagggaagggggagtaccacctgagtctccagcttctccggaggagccagctgtcctggtgggacgatagcaaccacaagtggattctccttcaattcctcagcttcccctctgcctccaaacaggggacacttcgggaatgctgaactaatgagaactgccagggaatcttcaaactttccaacggaacttgtttgctctttgatttggtttaaacctgagctggttgtggagcctgggaaaggtggaagagagagaggtcctgagggccccagggctgcgggctggcgaaggaaatggtcacaccccccgcccaccccaggcgaggatcctggtgacatgctcctctccctggctccggggagaagggcttggggtgacctgaagggaaccatcctggtaccccacatcctctcctccgggacagtcaccgaaaacacaggttccaaagtctacctggtgcctgagagcccagggcccttcctccgttttaagggggaagcaacatttggaggggatggatgggctggtcagctggtctccttttcctactcatactataccttcctgtacctgggtggatggagcgggaggatggaggagacgggacatctttcacctcaggctcctggtagagaagacaggggattctactctgtgcctcctgactatgtctggctaagagattcgccttaaatgctccctgtcccatggagagggacccagcataggaaagccacatactcagcctggatgggtggagaggctgagggactcactggagggcaccaagccagcccacagccagggaagtggggagggggggcggaaacccatgcctcccagctgagcactgggaatgtcagcccagtaagtattggccagtcaggcgcctcgtggtcagagcagagccaccaggtcccactgccccgagccctgcacagccctccctcctgcctgggtgggggaggctggaggtcattggagaggctggactgctgccaccccgggtgctcccgctctgccatagcactgatcagtgacaatttacaggaatgtagcagcgatggaattacctggaacagttttttgtttttgtttttgtttttgtttttgtgggggggggcaactaaacaaacacaaagtattctgtgtcaggtattgggctggacagggcagttgtgtgttggggtggtttttttctctatttttttgtttgtttcttgttttttaataatgtttacaatctgcctcaatcactctgtcttttataaagattccacctccagtcctctctcctcccccctactcaggcccttgaggctattaggagatgcttgaagaactcaacaaaatcccaatccaagtcaaactttgcacatatttatatttatattcagaaaagaaacatttcagtaatttataataaagagcactattttttaatgaaaaa

SEQ ID NO: 136 - DNA, 2174 bp, Homo sapiens
agaacatttctttttcacttcccctttcagactccagaatttgtttgccctctagggtagaatccgccaagctttgagagaaggctgtgactgctgtgctctgggcgccagctcgctccagggagtgatgggaatcctgtcattcttacctgtccttgccactgagagtgactgggctgactgcaagtccccccagccttggggtcatatgcttctgtggacagctgtgctattcctggctcctgttgctgggacacctgcagctcccccaaaggctgtgctgaaactcgagccccagtggatcaacgtgctccaggaggactctgtgactctgacatgccgggggactcacagccctgagagcgactccattcagtggttccacaatgggaatctcattcccacccacacgcagcccagctacaggttcaaggccaacaacaatgacagcggggagtacacgtgccagactggccagaccagcctcagcgaccctgtgcatctgactgtgctttctgagtggctggtgctccagacccctcacctggagttccaggagggagaaaccatcgtgctgaggtgccacagctggaaggacaagcctctggtcaaggtcacattcttccagaatggaaaatccaagaaattttcccgttcggatcccaacttctccatcccacaagcaaaccacagtcacagtggtgattaccactgcacaggaaacataggctacacgctgtactcatccaagcctgtgaccatcactgtccaagctcccagctcttcaccgatggggatcattgtggctgtggtcactgggattgctgtagcggccattgttgctgctgtagtggccttgatctactgcaggaaaaagcggatttcagctctcccaggataccctgagtgcagggaaatgggagagaccctccctgagaaaccagccaatcccactaatcctgatgaggctgacaaagttggggctgagaacacaatcacctattcacttctcatgcacccggatgctctggaagagcctgatgaccagaaccgtatttagtctccattgtcttgcattgggatttgagaagaaaatcagagagggaagatctggtatttcctggcctaaattccccttggggaggacagggagatgctgcagttccaaaagagaaggtttcttccagagtcatctacctgagtcctgaagctccctgtcctgaaagccacagacaatatggtcccaaataaccgactgcaccttctgtgcttcagctcttcttgacatcaaggctcttccgttccacatccacacagccaatccaattaatcaaaccactgttattaacagataatagcaacttgggaaatgcttatgttacaggttacgtgagaacaatcatgtaaatctatatgatttcagaaatgttaaaatagactaacctctaccagcacattaaaagtgattgtttctgggtgataaaattattgatgatttttattttctttatttttctataaagatcatatattacttttataataaaacattataaaaacaacattctgtttaccttttcaaggctgtattggttggagtgtagactgaactgcctggggtctgtttctcttcagtgatgagactcttaggaaggcaggaatggataggatagggggaggagaggagagatggggatttagaatgtagagtgagtgccccttttcttaaaactgaatacagtcacgcaccacataatgatgtttagttcaacaacagactgcatatatgatggtgatcccataaaattataataccatatttctattgtaccttttctattcctatgtttagatatatgagtacttaccattgtgttacaattgcctaaagtattcagtacagtagcatgctgtacaggtttgtagcctaggggcaataggctatacgctacagcctaggtgtgtagtaggccacaccatttaggtttgtataagtacctgctatgatgttcacacaacaaaattgcctgcatttctcaaaatgtatccccatatttcaacaatgcatgactgtactcttctgccaatgaccttgtattcttgtttccatgtcttcttctctttcctcctatggcaaataaaacactgttttgcaacacaaaaaaaaaaaaaaa

SEQ ID NO: 137 - DNA, 1646 bp, Homo sapiens
ggctctggcacccagggtccggcctgcgccttcccgccaggcctggacactggttcaacacctgtgacttcatgtgtgcgcgccggccacacctgcagtcacacctgtagccccctctgccaagagatccataccgaggcagcgtcggtggctacaagccctcagtccacacctgtggacacctgtgacacctggccacacgacctgtggccgcggcctggcgtctgctgcgacaggagcccttacctcccctgttataacacctgaccgccacctaactgcccctgcagaaggagcaatggccttggctcctgagagggcagccccacgcgtgctgttcggagagtggctccttggagagatcagcagcggctgctatgaggggctgcagtggctggacgaggcccgcacctgtttccgcgtgccctggaagcacttcgcgcgcaaggacctgagcgaggccgacgcgcgcatcttcaaggcctgggctgtggcccgcggcaggtggccgcctagcagcaggggaggtggcccgccccccgaggctgagactgcggagcgcgccggctggaaaaccaacttccgctgcgcactgcgcagcacgcgtcgcttcgtgatgctgcgggataactcgggggacccggccgacccgcacaaggtgtacgcgctcagccgggagctgtgctggcgagaaggcccaggcacggaccagactgaggcagaggcccccgcagctgtcccaccaccacaggcccagggctccctgctggggagctgtacgggtgggcagtagagacgacccccagccccgggccccagcccgcggcactaacgacaggcgaggccgcggccccagagtccccgcaccaggcagagccgtacctgtcaccctccccaagcgcctgcaccgcggtgcaagagcccagcccaggggcgctggacgtgaccatcatgtacaagggccgcacggtgctgcagaaggtggtgggacacccgagctgcacgttcctatacggccccccagacccagctgtccgggccacagacccccagcaggtagcattccccagccctgccgagctcccggaccagaagcagctgcgctacacggaggaactgctgcggcacgtggcccctgggttgcacctggagcttcgggggccacagctgtgggcccggcgcatgggcaagtgcaaggtgtactgggaggtgggcggacccccaggctccgccagcccctccaccccagcctgcctgctgcctcggaactgtgacacccccatcttcgacttcagagtcttcttccaagagctggtggaattccgggcacggcagcgccgtggctccccacgctataccatctacctgggcttcgggcaggacctgtcagctgggaggcccaaggagaagagcctggtcctggtgaagctggaaccctggctgtgccgagtgcacctagagggcacgcagcgtgagggtgtgtcttccctggatagcagcagcctcagcctctgcctgtccagcgccaacagcctctatgacgacatcgagtgcttccttatggagctggagcagcccgcctagaacccagtctaatgagaactccagaaagctggagcagcccacctagagctggccgcggccgc

SEQ ID NO: 138 - DNA, 3434 bp, Homo sapiens
actgtggctaagtgtggggaccagacaggactcgtggagacatccaggtgctgaagccttcagctactgtctcagttttttgaagtttagcaatggcgtctttctctgctgagaccaattcaactgacctactctcacagccatggaatgagcccccagtaattctctccatggtcattctcagccttacttttttactgggattgccaggcaatgggctggtgctgtgggtggctggcctgaagatgcagcggacagtgaacacaatttggttcctccacctcaccttggcggacctcctctgctgcctctccttgcccttctcgctggctcacttggctctccagggacagtggccctacggcaggttcctatgcaagctcatcccctccatcattgtcctcaacatgtttgccagtgtcttcctgcttactgccattagcctggatcgctgtcttgtggtattcaagccaatctggtgtcagaatcatcgcaatgtagggatggcctgctctatctgtggatgtatctgggtggtggcttttgtgatgtgcattcctgtgttcgtgtaccgggaaatcttcactacagacaaccataatagatgtggctacaaatttggtctctccagctcattagattatccagacttttatggagatccactagaaaacaggtctcttgaaaacattgttcagccgcctggagaaatgaatgataggttagatccttcctctttccaaacaaatgatcatccttggacagtccccactgtcttccaacctcaaacatttcaaagaccttctgcagattcactccctaggggttctgctaggttaacaagtcaaaatctgtattctaatgtatttaaacctgctgatgtggtctcacctaaaatccccagtgggtttcctattgaagatcacgaaaccagcccactggataactctgatgcttttctctctactcatttaaagctgttccctagcgcttctagcaattccttctacgagtctgagctaccacaaggtttccaggattattacaatttaggccaattcacagatgacgatcaagtgccaacacccctcgtggcaataacgatcactaggctagtggtgggtttcctgctgccctctgttatcatgatagcctgttacagcttcattgtcttccgaatgcaaaggggccgcttcgccaagtctcagagcaaaacctttcgagtggccgtggtggtggtggctgtctttcttgtctgctggactccataccacatttttggagtcctgtcattgcttactgacccagaaactcccttggggaaaactctgatgtcctgggatcatgtatgcattgctctagcatctgccaatagttgctttaatcccttcctttatgccctcttggggaaagattttaggaagaaagcaaggcagtccattcagggaattctggaggcagccttcagtgaggagctcacacgttccacccactgtccctcaaacaatgtcatttcagaaagaaatagtacaactgtgtgaaaatgtggagcagccaacaagcaggggctcttaggcaatcacatagtgaaagtttataagaggatgaagtgatatggtgagcagcggacttcaaaaactgtcaaagaatcaatccagcggttctcaaacggtacacagactattgacatcagcatcacctagaaacttgttagaaatgcaaattctcaagccgcatcccagacttgctgaatcggaatctctgggggttgggacccagcaagggcacttaacaaaccctcgtttctgattaatgctaaatgtaagaatcattgtaaacattagttctatttctatcccaaactaagctatgtgaaataagagaagctactttgtttttaaatgatgttgaatatttgtcgatatttccatcattaaatttttccttagcattgtctaagtcttccagattccatttaaaaccatttcttgttctcctacgtgagtgaaagatgatcatatatcctaatgctttgttgtcgtgtggtgttgatggttttaaacgaaaagaaagtgcaaaaagaaaatgcctgtgaagacaagaagccatgagactgagtctggagcatagggttatgcaatgatgcctgtccctgggaacacccctgggtacaggatatagaaatttccactattacatagagtttccactattacaactaaataagcatctattgtgtgaaaactgactcatgaaatgttatgaaagctgtggtttggggagttctgtttcttctaactgcctaccggttgggcacctattttccactcctcttcctaagctccttaatttccttattactccccagcctccaaatcttccacatcagactttgtgcctcaaacaacctctaatttcgtaagattctagttactcccttcctcttgctccaaatgaatactttctaagaaagtatttcaagtggaaggagaaagagggtggaggatggagcagcaattcttctactctctgcaactgagtaccctaccaggcttgccatcacattttaaaacatgacgacaggcaacttacatgccaaaattaccaaatatatcttctgggttttttaaatccttttctttgccaaagtaatacatgcacatagttttaaaataatttaataaggtatataatgaaatatgaggtctcctacctcactgtgcccaaaagttccctcctcccactctcatttcccagagataatccttgcacaattttagatgtttcctttgataattatcatgatgtttctaaatcatgtgcttatgctgctcttttctggaggcatgataaaacgacttcttgttttgaaagatgaagatgtttatccaagcaccccatatttttaatttgtttatccagcatcccaacattcattaataaccatattttaattcattcatgaccacatatttttcttctactttgtctatacactccaaccatttatatagctttccttctgtccctttttcatttaaaacaaaattacctaactccctaccaccttctcatttttctgtatatataaatgtttgtgtcaaacgtctgaaatttctggcttgtttgtatcacaacgtggcctcatctaaaccaaatacaatgatgtagtctaaaaacagaaaatgacatgtgttttagacctgcaagacactatctgttcaatggctgaggtgagggtctggactacagattttttataaagtatatgcagaaaaattacaaatcactaggaattctttcagttgtgaagaatgtctgacataagatttgaagtgctacctttccagcttatatattaatttgcttatatatttgatatgaataaatgctttttttctcatgggtccttgcgaggctcagagatttatgaa

SEQ ID NO: 139 - DNA, 590 bp, Homo sapiens
gtcagaacggccgatctccagcccaagatgattccagcagtggtcttgctcttactccttttggttgaacaagcagcggccctgggagagcctcagctctgctatatcctggatgccatcctgtttctgtatggaattgtcctcaccctcctctactgtcgactgaagatccaagtgcgaaaggcagctataaccagctatgagaaatcagatggtgtttacacgggcctgagcaccaggaaccaggagacttacgagactctgaagcatgagaaaccaccacagtagctttagaatagatgcggtcatattcttctttggcttctggttcttccagccctcatggttggcatcacatatgcctgcatgccattaacaccagctggccctacccctataatgatcctgtgtcctaaattaatatacaccagtggttcctcctccctgttaaagactaatgctcagatgctgtttacggatatttatattctagtctcactctcttgtcccacccttcttctcttccccattcccaactccagctaaaatatgggaagggagaacccccaataaaactgccatggactgga

SEQ ID NO: 140 - DNA, 2140 bp, Homo sapiens
agcattgttagagcctgtggaaaacactttacaactgtgtaactgtcttcatctttacagaggaatagtctacaaaggaagacttgtaacctggagaagagacctgtcatttactccatcctttatagtgatgctacaggacgaagaggaatggataaaaacattggcgagcaactcaataaagcgtatgaagccttccggcaggcatgcatggatagagattctgcagtaaaagaattacagcaaaagactgagaactatgagcagagaatacgtgaacaacaggaacagctgtcacttcaacagactattattgacaagctaaaatctcagttacttcttgtgaattccactcaagataacaattatggctgtgttcctctgcttgaagacagtgaaacaagaaagaataatttgactcttgatcagccacaagataaagtgatttcaggaatagcaagagaaaaactaccaaaggtaagaagacaagaggtttcttctcctagaaaagaaacttcagcaaggagtcttggcagtcctttgctccatgaaaggggtaatatagagaagactttctgggatctgaaagaagaatttcataaaatatgcatgctagcaaaagcacagaaagaccacttaagcaaacttaatataccagacactgcaactgaaacacagtgctctgtgcctatacagtgtacggataaaacagataaacaagaagcgctgtttaagcctcaggctaaagatgatataaatagaggtgcaccatccatcacatctgtcacaccaagaggactgtgcagagatgaggaagacacctcttttgaatcactttctaaattcaatgtcaagtttccacctatggacaatgactcaactttcttacatagcactccagagagacccggcatccttagtcctgccacgtctgaggcagtgtgccaagagaaatttaatatggagttcagagacaacccagggaactttgttaaaacagaagaaactttatttgaaattcagggaattgaccccatagcttcagctatacaaaaccttaaaacaactgacaaaacaaagccctcaaatctcgtaaacacttgtatcaggacaactctggatagagctgcgtgtttgccacctggagaccataatgcattatatgtaaatagcttcccacttctggacccatctgatgcaccttttccctcactcgattccccgggaaaagcaatccgaggaccacagcagcccatttggaagccctttcctaatcaagacagtgactcggtggtactaagtggcacagactcagaactgcatatacctcgagtatgtgaattctgtcaagcagttttcccaccatccattacatccaggggggatttccttcggcatcttaattcacacttcaatggagagacttaagacacatttgaaaacagacatatcaagttctatgtgatgattttgggtttttaatactataaatacttgattgtaaactaaattcaagatcatttataggaaaatctagtttcacagctatttgaatttttttctggatttactatataactcttattttttaaaagatcattctgttctttcaaggagaaataagcctaaaagaagaaaaacaaaaaaaattctgtataaaactgtaatcctttgtattcatgtttacagtgctattactataattcaaaattatgtatgtgacttagagttatataatcataatttatgtttatttcaaatatctaagtttattgcttggatttctagtgagagctgttgaatttggtgatgtcaaatgtttctagggtttttttagtttgtttttattgaaaaatttaattatttatgctataggtgatattctctttgaataaacctataatagaaaatagcagacaacataaacatctttgtaaatatcaaacctaatacatttcttgtccagtgataaaacaactggtagaattatttaaacactttagatttttaaataatatacatggctttaatttttactgtgtgtatagctacatgatgaaattaattaaatattaagaggtacttatgttgtgatcatttgtatgtcctttgttcctgagtaaaaaaaaaaaaaaaaaaa

SEQ ID NO: 141 - DNA, 862 bp, Homo sapiens
agagactcccaccccagctcagagggagcaggggcccagccagggacggaccctcattcctcccagggaccccagacctctgtctctctcgggccttggctccttgaacttttggccgccatgtgcttcccgaaggtcctctctgatgacatgaagaagctgaaggcccgaatgcaccaggccatagaaagattttatgataaaatgcaaaatgcagaatcaggacgtggacaggtgatgtcgagcctggcagagctggaggacgacttcaaagagggctacctggagacagtggcggcttattatgaggagcagcacccagagctcactcctctacttgaaaaagaaagagatggattacggtgccgaggcaacagatcccctgtcccggatgttgaggatcccgcaaccgaggagcctggggagagcttttgtgacaaggtcatgagatggttccaggccatgctgcagcggctgcagacctggtggcacggggttctggcctgggtgaaggagaaggtggtggccctggtccatgcagtgcaggccctctggaaacagttccagagtttctgctgctctctgtcagagctcttcatgtcctctttccagtcctacggagccccacggggggacaaggaggagctgacaccccagaagtgctctgaaccccaatcctcaaaatgaagatactgacaccacctttgccctccccgtcaccgcgcacccaccctgacccctccctcagctgtcctgtgccccgccctctcccgcacactcagtccccctgcctggcgttcctgccgcagctctgacctggtgctgtcgccctggcatcttaataaaacctgcttatacttcc

SEQ ID NO: 142 - DNA, 1219 bp, Homo sapiens
gtgtcgcgggtcggagctcggtcctgctggaggccacgggtgccacacactcggtcccgacatgatggcgagcatgcgagtggtgaaggagctggaggatcttcagaagaagcctcccccatacctgcggaacctgtccagcgatgatgccaatgtcctggtgtggcacgctctcctcctacccgaccaacctccctaccacctgaaagccttcaacctgcgcatcagcttcccgccggagtatccgttcaagcctcccatgatcaaattcacaaccaagatctaccaccccaacgtggacgagaacggacagatttgcctgcccatcatcagcagtgagaactggaagccttgcaccaagacttgccaagtcctggaggccctcaatgtgctggtgaatagaccgaatatcagggagcccctgcggatggacctcgctgacctgctgacacagaatccggagctgttcagaaagaatgccgaagagttcaccctccgattcggagtggaccggccctcctaactcatgttctgaccctctgtgcactggatcctcggcatagcggacggacacacctcatggactgaggccagagccccctgtggcccattccccattcatttttcccttcttaggttgttagtcattagtttgtgtgtgtgtgtggtggagggaagggagctatgagtgtgtgtgttgtgtatggactcactcccaggttcacctggccacaggtgcacccttcccacaccctttacattccccagagccaagggagtttaagtttgcagttacaggccagttctccagctctccatcttagagagacaggtcaccttgcaggcctgcttgcaggaaatgaatccagcagccaactcgaatccccctagggctcaggcactgagggcctggggacagtggagcatatgggtgggagacagatggagggtaccctatttacaactgagtcagccaagccactgatgggaatatacagatttaggtgctaaaccatttattttccacggatgagtcacaatctgaagaatcaaacttccatcctgaaaatctatatgtttcaaaaccacttgccatcctgttagattgccagttcctgggaccaggcctcagactgtgaagtatatatcctccagcattcagtccagggggagccacggaaaccatgttcttgcttaagccattaaagtcagagatgaa

SEQ ID NO: 143 - DNA, 2936 bp, Homo sapiens
ggcagtttcccgaccagagagaacgaacgtgtctgcgggcgcgcggggagcagaggcggtggcgggcggcggcggcaccgggagccgccgagtgaccctcccccgcccctctggccccccaccctcccacccgcccgtggcccgcgcccatggccgcgcgcgctccacacaactcaccggagtccgcgccttgcgccgccgaccagttcgcagctccgcgccacggcagccagtctcacctggcggcaccgcccgcccaccgccccggccacagcccctgcgcccacggcagcactcgaggcgaccgcgacagtggtgggggacgctgctgagtggaagagagcgcagcccggccaccggacctacttactcgccttgctgattgtctatttttgcgtttacaacttttctaagaacttttgtatacaaaggaactttttaaaaaagacgcttccaagttatatttaatccaaagaagaaggatctcggccaatttggggttttgggttttggcttcgtttcttctcttcgttgactttggggttcaggtgccccagctgcttcgggctgccgaggaccttctgggcccccacattaatgaggcagccacctggcgagtctgacatggctgtcagcgacgcgctgctcccatctttctccacgttcgcgtctggcccggcgggaagggagaagacactgcgtcaagcaggtgccccgaataaccgctggcgggaggagctctcccacatgaagcgacttcccccagtgcttcccggccgcccctatgacctggcggcggcgaccgtggccacagacctggagagcggcggagccggtgcggcttgcggcggtagcaacctggcgcccctacctcggagagagaccgaggagttcaacgatctcctggacctggactttattctctccaattcgctgacccatcctccggagtcagtggccgccaccgtgtcctcgtcagcgtcagcctcctcttcgtcgtcgccgtcgagcagcggccctgccagcgcgccctccacctgcagcttcacctatccgatccgggccgggaacgacccgggcgtggcgccgggcggcacgggcggaggcctcctctatggcagggagtccgctccccctccgacggctcccttcaacctggcggacatcaacgacgtgagcccctcgggcggcttcgtggccgagctcctgcggccagaattggacccggtgtacattccgccgcagcagccgcagccgccaggtggcgggctgatgggcaagttcgtgctgaaggcgtcgctgagcgcccctggcagcgagtacggcagcccgtcggtcatcagcgtcagcaaaggcagccctgacggcagccacccggtggtggtggcgccctacaacggcgggccgccgcgcacgtgccccaagatcaagcaggaggcggtctcttcgtgcacccacttgggcgctggaccccctctcagcaatggccaccggccggctgcacacgacttccccctggggcggcagctccccagcaggactaccccgaccctgggtcttgaggaagtgctgagcagcagggactgtcaccctgccctgccgcttcctcccggcttccatccccacccggggcccaattacccatccttcctgcccgatcagatgcagccgcaagtcccgccgctccattaccaagagctcatgccacccggttcctgcatgccagaggagcccaagccaaagaggggaagacgatcgtggccccggaaaaggaccgccacccacacttgtgattacgcgggctgcggcaaaacctacacaaagagttcccatctcaaggcacacctgcgaacccacacaggtgagaaaccttaccactgtgactgggacggctgtggatggaaattcgcccgctcagatgaactgaccaggcactaccgtaaacacacggggcaccgcccgttccagtgccaaaaatgcgaccgagcattttccaggtcggaccacctcgccttacacatgaagaggcatttttaaatcccagacagtggatatgacccacactgccagaagagaattcagtattttttacttttcacactgtcttcccgatgagggaaggagcccagccagaaagcactacaatcatggtcaagttcccaactgagtcatcttgtgagtggataatcaggaaaaatgaggaatccaaaagacaaaaatcaaagaacagatggggtctgtgactggatcttctatcattccaattctaaatccgacttgaatattcctggacttacaaaatgccaagggggtgactggaagttgtggatatcagggtataaattatatccgtgagttgggggagggaagaccagaattcccttgaattgtgtattgatgcaatataagcataaaagatcaccttgtattctctttaccttctaaaagccattattatgatgttagaagaagaggaagaaattcaggtacagaaaacatgtttaaatagcctaaatgatggtgcttggtgagtcttggttctaaaggtaccaaacaaggaagccaaagttttcaaactgctgcatactttgacaaggaaaatctatatttgtcttccgatcaacatttatgacctaagtcaggtaatatacctggtttacttctttagcatttttatgcagacagtctgttatgcactgtggtttcagatgtgcaataatttgtacaatggtttattcccaagtatgccttaagcagaacaaatgtgtttttctatatagttccttgccttaataaatatgtaatataaatttaagcaaacgtctattttgtatatttgtaaactacaaagtaaaatgaacattttgtggagtttgtattttgcatactcaaggtgagaattaagttttaaataaacctataatattttatctgaa

SEQ ID NO: 144 - DNA, 1001 bp, Homo sapiens
gaagattccagcaccctcccctaactccaggccagactctaaaggggagatctggatggcatctacttcgtatgactattgcagagtgcccatggaagacggggataagcgctgtaagcttctgctggggataggaattctggtgctcctgatcatcgtgattctgggggtgcccttgattatcttcaccatcaaggccaacagcgaggcctgccgggacggccttcgggcagtgatggagtgtcgcaatgtcacccatctcctgcaacaagagctgaccgaggcccagaagggctttcaggatgtggaggcccaggccgccacctgcaaccacactgtgatggccctaatggcttccctggatgcagagaaggcccaaggacaaaagaaagtggaggagcttgagggagagatcactacattaaaccataagcttcaggacgcgtctgcagaggtggagcgactgagaagagaaaaccaggtcttaagcgtgagaatcgcggacaagaagtactaccccagctcccaggactccagctccgctgcggcgccccagctgctgattgtgctgctgggcctcagcgctctgctgcagtgagatcccaggaagctggcacatcttggaaggtccgtcctgctcggcttttcgcttgaacattcccttgatctcatcagttctgagcgggtcatggggcaacacggttagcggggagagcacggggtagccggagaagggcctctggagcaggtctggaggggccatggggaagtcctgggtgtggggacacagtcgggttgacccagggctgtctccctccagagcctccctccggacaatgagtcccccctcttgtctcccaccctgagattgggcatggggtgcggtgtggggggcatgtgctgcctgttgttatgggttttttttgcggggggggttgcttttttctggggtctttgagctccaaaaaataaacacttcctttgagggagagcacacctga

SEQ ID NO: 145 - DNA, 5387 bp, Homo sapiens
accgcccggtacgtgctcgcgcgaaggctgcggcgcggcgctcgcgcctcttaggcttggcggtggcggcggcggcagcttcgcgccgaatccccggggagcggcggtggcggcgtcctggggccaggaggagcgaacacctgccgcggtcctcccgccggcgctgggctctgtgtgctccgggatggagcaggtgtgcagagggtgagaacccagctctgggaccaagtcacttgcttccttacttagcaagactatcgacttgagcaaacttggacctgggatgaggatgtctgtgggcctctcgctgctgctgcccctctcggggaggacctttctcctcctgctctctgtggttatggctcagtcccactggcccagtgaaccctcagaggctgtcagggactgggaaaaccagcttgaggcatccatgcactcagtgctctcagacctccacgaggctgttcccacagtggttggcattcctgatggcacggctgtcgtcgggcgctcatttcgagtgaccattccaacagatttgattgcctccagtggagatatcatcaaggtatcagcggcagggaaggaggctttgccatcttggctgcactgggactcacagagccacaccctggagggcctcccccttgacactgataagggtgtgcattacatttcagtgagcgctacacggctgggggccaacgggagccacatcccccagacctccagtgtgttctccatcgaggtctaccctgaagaccacagtgagctgcagtcggtgaggacagcctccccagaccctggtgaggtggtatcatctgcctgtgctgcggatgaacctgtgactgttttgacggtgattttggatgccgacctcaccaagatgaccccaaagcaaaggattgacctcctgcacaggatgcggagcttctcagaagtagagcttcacaacatgaaattagtgccggtggtgaataacagactatttgacatgtcggccttcatggctggcccgggaaatgcaaaaaaggtggtggagaatggggcccttctctcctggaagctgggctgctccctgaaccagaacagtgtgcctgacattcatggtgtagaggcccctgccagggagggcgcaatgtctgctcagcttggctaccctgtggtgggttggcacatcgccaataagaagccccctcttcccaaacgcgtccggaggcagatccatgctacacccacacctgtcactgccattgggcccccaaccacggctatccaggagcccccatccaggatcgtgccaacccccacatctccagccattgctcctccaacagagaccatggctcctccagtcagggatcctgttcctgggaaacccacggtcaccatccggactcgaggcgccattattcaaaccccaaccctaggccccatccagcctactcgggtgtcagaagctggcaccacagttcctggccagattcgcccaacgatgaccattcctggctatgtggagcctactgcagttgctacccctcccacaaccaccaccaagaagccacgagtatccacaccaaaaccagcaacgccttcaactgactccaccaccaccacgactcgcaggccaaccaagaaaccacggacaccccggccagtgccccgggtcaccaccaaagtttccatcaccagattggaaactgcctcaccgcctactcgtattcgcaccaccaccagtggagtgccccgtggcggagaacccaaccagcgcccagagctcaagaaccatattgacagggtagatgcctgggttggcacctactttgaggtgaagatcccgtcagacactttctatgaccatgaggacaccaccactgacaagctgaagctgaccctgaaactgcgggagcagcagctggtgggcgagaagtcctgggtacagttcaacagcaacagccagctcatgtatggccttcccgacagcagccacgtgggcaaacacgagtatttcatgcatgccacagacaaggggggcctgtcggctgtggatgccttcgagatccacgtccacaggcgcccccaaggggatagggctcctgcaaggttcaaggccaagtttgtgggtgacccggcactggtgttgaatgacatccacaagaagattgccttggtaaagaaactggccttcgcctttggagaccgaaactgtagcaccatcaccctgcagaatatcacccggggctccatcgtggtggaatggaccaacaacacactgcccttggagccctgccccaaggagcagatcgctgggctgagccgccggatcgctgaggatgatggaaaacctcggcctgccttctccaacgccctagagcctgactttaaggccacaagcatcactgtgacgggctctggcagttgtcggcacctacagtttatccctgtggtaccacccaggagagtgccctcagaggcgccgcccacagaagtgcctgacagggaccctgagaagagcagtgaggatgatgtctacctgcacacagtcattccggccgtggtggtcgcagccatcctgctcattgctggcatcattgccatgatctgctaccgcaagaagcggaagggcaagcttacccttgaggaccaggccaccttcatcaagaagggggtgcctatcatctttgcagacgaactggacgactccaagcccccaccctcctccagcatgccactcattctgcaggaggagaaggctcccctaccccctcctgagtaccccaaccagagtgtgcccgagaccactcctctgaaccaggacaccatgggagagtacacgcccctgcgggatgaggatcccaatgcgcctccctaccagcccccaccgcccttcacagcacccatggagggcaagggctcccgtcccaagaacatgaccccataccggtcacctcctccctatgtcccaccttaacccgcaagcgcctgggtggaggcagggtagggcaggggcctggagacgacatggtgttgtctgtggagaccggtggcctgcagaccattgcccaccgggagccgacacctgacctagcacacactgacacaggggcctggacaagcccgccctctctggtcctcccaaaccccaaagcagctggagagactttggggacttttttatttttattttttgcctaacagcttttggtttgttcatagagaattcttcgcttcatttttgatggctggctctgaaagcaccatgtggagtggaggtggagggagcgaggaaccatgaatgaactcgcaggcagtgccgggcggccccctggctctctgcgttttgcctttaacactaactgtactgttttttctattcacgtgtgtctagctgcaggatgtaacatggaaaacagtaactaaagattaaattcaaaggactttcagaagttaaggttaagtttttacgtttaatctgctgtttacctaaacttgtatgtataatttttgggtgggtatggggaattgctttgctaaaaataagctcccagggtgtttcaaacttagagaagaccaagggacagtattttttatcaaaggaatactattttttcacactacgtcaacttggttgctctgataccccagagcctgattgggggcctcccggccctggctcacgccaagtccctggtgctgggtttgctctcccgctgttgccaggggctggaagctggaggggtctcttgggccatggacatccccacttccagcccatgtacactagtggcccacgaccaaggggtcttcatttccatgaaaaagggactccaagaggcagtggtggctgtggcccccaactttggtgctccagggtgggccagctgcttgtgggggcacctgggaggtcaaaggtctccaccacatcaacctattttgttttaccctttttctgtgcattgtttttttttttcctcctaaaaggaatatcacggttttttgaaacactcagtgggggacattttggtgaagatgcaatatttttatgtcatgtgatgctctttcctcacttgaccttggccgctttgtcctaacagtccacagtcctgccccgacccaccccatcccttttctctggcactccagtcccaggccttgggcctgaactactggaaaaggtctggcggctggggaggagtgccagcaatagttcataataaaaatctgttagctctcaaagctaattttttactaaagtttttatacagcctcaaattgttttattaaaaaaaagatttaaaatggtgatgcttacagcagtttgtacgagctcttaagtgttgattccatggaactgacggctttgcttgttttgattcttttccccctacttttcctaatggtttaaattctggaattacactggggttcttttgccttttttagcagaacatccgtccgtccatctgcatctctgtcccatgactcaggggcgcccactctgcttcgattctcctcctgtggaagaaaccattttgagcatgacttttcttgatgtctgaagcgttattttgggtactttttagggaggaatgcctttcgcaataatgtatccattccctgattgagggtgggtgggtggacccaggctccctttgcacacagagcagctacttctaagccatatcgactgttttgcagaggatttgtgtgtgctgcctcaggaggggagggctggtaggagggggggagaggtctctgtcctactgctctccagagggcatttccccttgcgccttctcccacagggcccagcccctctcccctgccccagtccccagggggtactctggagtgagcagtgcccctgtgggggagcctgtaaatgcgggctcagtggaccactggtgactgggctcatgcctccaagtcagagtttccctggtgccccagagacaggagcacaagtgggatctgacctggtgagattatttctgatgacctcatcaaaaaataaacaattcccaatgttccaggtgagggctttgaaaggccttccaaacagctccgtcgcccctagcaactccaccattgggcactgccatgcagagacgtggctggcccagaatggcctgttgccatagcaactggaggcgatggggcagtgaacagaataacaacagcaacaatgcctttgcaggcagcctgctcccctgagcgctgggctggtgatggtcgttggactctgtgagatggagagccaatctcacattcaagtgttcaccaaccactgatgtgtttttatttccttctatatgattttaagatgtgttttctgcattctgtaaagaaacatatcaaactaaataaaagcagtgtctttattacaa

SEQ ID NO: 146 - DNA, 2013 bp, Homo sapiens
gcgaaggacatttgggctgtgtgtgcgacgcgggtcggaggggcagtcgggggaaccgcgaagaagccgaggagcccggagccccgcgtgacgctcctctctcagtccaaaagcggcttttggttcggcgcagagagacccgggggtctagcttttcctcgaaaagcgccgccctgcccttggccccgagaacagacaaagagcaccgcagggccgatcacgctgggggcgctgaggccggccatggtcatggaagtgggcaccctggacgctggaggcctgcgggcgctgctgggggagcgagcggcgcaatgcctgctgctggactgccgctccttcttcgctttcaacgccggccacatcgccggctctgtcaacgtgcgcttcagcaccatcgtgcggcgccgggccaagggcgccatgggcctggagcacatcgtgcccaacgccgagctccgcggccgcctgctggccggcgcctaccacgccgtggtgttgctggacgagcgcagcgccgccctggacggcgccaagcgcgacggcaccctggccctggcggccggcgcgctctgccgcgaggcgcgcgccgcgcaagtcttcttcctcaaaggaggatacgaagcgttttcggcttcctgcccggagctgtgcagcaaacagtcgacccccatggggctcagccttcccctgagtactagcgtccctgacagcgcggaatctgggtgcagttcctgcagtaccccactctacgatcagggtggcccggtggaaatcctgccctttctgtacctgggcagtgcgtatcacgcttcccgcaaggacatgctggatgccttgggcatcactgccttgatcaacgtctcagccaattgtcccaaccattttgagggtcactaccagtacaagagcatccctgtggaggacaaccacaaggcagacatcagctcctggttcaacgaggccattgacttcatagactccatcaagaatgctggaggaagggtgtttgtccactgccaggcaggcatttcccggtcagccaccatctgccttgcttaccttatgaggactaatcgagtcaagctggacgaggcctttgagtttgtgaagcagaggcgaagcatcatctctcccaacttcagcttcatgggccagctgctgcagtttgagtcccaggtgctggctccgcactgttcggcagaggctgggagccccgccatggctgtgctcgaccgaggcacctccaccaccaccgtgttcaacttccccgtctccatccctgtccactccacgaacagtgcgctgagctaccttcagagccccattacgacctctcccagctgctgaaaggccacgggaggtgaggctcttcacatcccattgggactccatgctccttgagaggagaaatgcaataactctgggaggggctcgagagggctggtccttatttatttaacttcacccgagttcctctgggtttctaagcagttatggtgatgacttagcgtcaagacatttgctgaactcagcacattcgggaccaatatatagtgggtacatcaagtccatctgacaaaatggggcagaagagaaaggactcagtgtgtgatccggtttctttttgctcgcccctgttttttgtagaatctcttcatgcttgacatacctaccagtattattcccgacgacacatatacatatgagaatataccttatttatttttgtgtaggtgtctgccttcacaaatgtcattgtctactcctagaagaaccaaatacctcaatttttgtttttgagtactgtactatcctgtaaatatatcttaagcaggtttgttttcagcactgatggaaaataccagtgttgggtttttttttagttgccaacagttgtatgtttgctgattatttatgacctgaaataatatatttcttcttctaagaagacattttgttacataaggatgacttttttatacaatggaataaattatggcatttctattgaaa

SEQ ID NO: 147 - DNA, 2477 bp, Homo sapiens
ggcttctagggcggcgagcggccgggctggctatcgagcgagcggggcgggaacgcggagttgcgccgccgctcgggcgccgggctccgtcgcggccgcagccccgcgggtcgccctcccgtgcctcgcccgcggacaccctggccgtggacaccctggccgtgggcacccgcggggcgcgcggcgcggggccgctggccggcggcggcggcggcatgaaggtcacgtcgctcgacgggcgccagctgcgcaagatgctccgcaaggaggcggcggcgcgctgcgtggtgctcgactgccggccctatctggccttcgctgcctcgaacgtgcgcggctcgctcaacgtcaacctcaactcggtggtgctgcggcgggcccggggcggcgcggtgtcggcgcgctacgtgctgcccgacgaggcggcgcgcgcgcggctcctgcaggagggcggcggcggcgtcgcggccgtggtggtgctggaccagggcagccgccactggcagaagctgcgagaggagagcgccgcgcgtgtcgtcctcacctcgctactcgcttgcctacccgccggcccgcgggtctacttcctcaaagggggatatgagactttctactcggaatatcctgagtgttgcgtggatgtaaaacccatttcacaagagaagattgagagtgagagagccctcatcagccagtgtggaaaaccagtggtaaatgtcagctacaggccagcttatgaccagggtggcccagttgaaatccttcccttcctctaccttggaagtgcctaccatgcatccaagtgcgagttcctcgccaacctgcacatcacagccctgctgaatgtctcccgacggacctccgaggcctgcgcgacccacctacactacaaatggatccctgtggaagacagccacacggctgacattagctcccactttcaagaagcaatagacttcattgactgtgtcagggaaaagggaggcaaggtcctggtccactgtgaggctgggatctcccgttcacccaccatctgcatggcttaccttatgaagaccaagcagttccgcctgaaggaggccttcgattacatcaagcagaggaggagcatggtctcgcccaactttggcttcatgggccagctcctgcagtacgaatctgagatcctgccctccacgcccaacccccagcctccctcctgccaaggggaggcagcaggctcttcactgataggccatttgcagacactgagccctgacatgcagggtgcctactgcacattccctgcctcggtgctggcaccggtgcctacccactcaacagtctcagagctcagcagaagccctgtggcaacggccacatcctgctaaaactgggatggaggaatcggcccagccccaagagcaactgtgatttttgtttttaagactcatggacatttcatacctgtgcaatactgaagacctcattctgtcatgctgccccagtgagatagtgagtggtcaccaggcttgcaaatgaacttcagacggacctcagggtaggttctcgggactgaaggaaggccaagccattacgggagcacagcatgtgctgactactgtacttccagacccctgccctcttgggactgcccagtccttgcacctcagagttcgccttttcatttcaagcataaggcaataaatacctgcagcaacgtgggagaaagaagttgctggaccaggagaaaaggcagttatgaagccaattcattttgaaggaagcacaatttccaccttattttttgaactttggcagtttcaatgtctgtctctgttgcttcggggcataagctgatcaccgtctagttgggaaagtaaccctacagggtttgtagggacatgatcagcatcctgatttgaaccctgaaatgttgtgtagacaccctcttgggtccaatgaggtagttggttgaagtagcaagatgttggcttttctggattttttttgccatgggttcttcactgaccttggactttggcatgattcttagtcatacttgaacttgtctcattccacctcttctcagagcaactcttcctttgggaaaagagttcttcagatcatagaccaaaaaagtcataccttcgaggtggtagcagtagattccaggaggagaagggtacttgctaggtatcctgggtcagtggcggtgcaaactggtttcctcagctgcctgtccttctgtgtgcttatgtctcttgtgacaattgttttcctccctgcccctggaggttgtcttcaagctgtggacttctgggatttgcagattttgcaacgtggtactactttttttttctttttgtctgttagttatttctccaggggaaaaggcaataattttctaagacccgtgtgaatgtgaagaaaagcagtatgttactggttgttgttgttgttcttgttttttatagtgtaaaataaaaatagtaaaa

SEQ ID NO: 148 - DNA, 4674 bp, Homo sapiens
agtctggccggctccgtcctcccgtaggctccgctgtagctagcaatgtgacaccaggacgcactcgctctcgcgcgctctcccaggctcgttctccctcgccctctctctctcacacacgcacgcacacacccacctctcccataaacacacacacacacatgcacacccacacccacgcgcgcccgcaccgccccacgcgcacacactcctgcccacgcccacgcagcgctccgggaagtccggtccgggcgagagcgcgaaaggataccgagaagccacccgcggagagcgcagcggcgccctgggacgcggcgctctcccggcgctgctgcctcggcttggtctcggcctgcgggccgtcggccggcgatggccctggattatctactactgctcctcctggcatccgcagtggctgcgatggaagaaacgttaatggacaccagaacggctactgcagagctgggctggacggccaatcctgcgtccgggtgggaagaagtcagtggctacgatgaaaacctgaacaccatccgcacctaccaggtgtgcaatgtcttcgagcccaaccagaacaattggctgctcaccaccttcatcaaccggcggggggcccatcgcatctacacagagatgcgcttcactgtgagagactgcagcagcctccctaatgtcccaggatcctgcaaggagaccttcaacttgtattactatgagactgactctgtcattgccaccaagaagtcagccttctggtctgaggccccctacctcaaagtagacaccattgctgcagatgagagcttctcccaggtggactttgggggaaggctgatgaaggtaaacacagaagtcaggagctttgggcctcttactcggaatggtttttacctcgcttttcaggattatggagcctgtatgtctcttctttctgtccgtgtcttcttcaaaaagtgtcccagcattgtgcaaaattttgcagtgtttccagagactatgacaggggcagagagcacatctctggtgattgctcggggcacatgcatccccaacgcagaggaagtggacgtgcccatcaaactctactgcaacggggatggggaatggatggtgcctattgggcgatgcacctgcaagcctggctatgagcctgagaacagcgtggcatgcaaggcttgccctgcagggacattcaaggccagccaggaagctgaaggctgctcccactgcccctccaacagccgctcccctgcagaggcgtctcccatctgcacctgtcggaccggttattaccgagcggactttgaccctccagaagtggcatgcactagcgtcccatcaggtccccgcaatgttatctccatcgtcaatgagacgtccatcattctggagtggcaccctccaagggagacaggtgggcgggatgatgtgacctacaacatcatctgcaaaaagtgccgggcagaccgccggagctgctcccgctgtgacgacaatgtggagtttgtgcccaggcagctgggcctgacggagtgccgcgtctccatcagcagcctgtgggcccacaccccctacacctttgacatccaggccatcaatggagtctccagcaagagtcccttccccccacagcacgtctctgtcaacatcaccacaaaccaagccgccccctccaccgttcccatcatgcaccaagtcagtgccactatgaggagcatcaccttgtcatggccacagccggagcagcccaatggcatcatcctggactatgagatccggtactatgagaaggaacacaatgagttcaactcctccatggccaggagtcagaccaacacagcaaggattgatgggctgcggcctggcatggtatatgtggtacaggtgcgtgcccgcactgttgctggctacggcaagttcagtggcaagatgtgcttccagactctgactgacgatgattacaagtcagagctgagggagcagctgcccctgattgctggctcggcagcggccggggtcgtgttcgttgtgtccttggtggccatctctatcgtctgtagcaggaaacgggcttatagcaaagaggctgtgtacagcgataagctccagcattacagcacaggccgaggctccccagggatgaagatctacattgaccccttcacttacgaggatcccaacgaagctgtccgggagtttgccaaggagattgatgtatcttttgtgaaaattgaagaggtcatcggagcaggggagtttggagaagtgtacaaggggcgtttgaaactgccaggcaagagggaaatctacgtggccatcaagaccctgaaggcagggtactcggagaagcagcgtcgggactttctgagtgaggcgagcatcatgggccagttcgaccatcctaacatcattcgcctggagggtgtggtcaccaagagtcggcctgtcatgatcatcacagagttcatggagaatggtgcattggattctttcctcaggcaaaatgacgggcagttcaccgtgatccagcttgtgggtatgctcaggggcatcgctgctggcatgaagtacctggctgagatgaattatgtgcatcgggacctggctgctaggaacattctggtcaacagtaacctggtgtgcaaggtgtccgactttggcctctcccgctacctccaggatgacacctcagatcccacctacaccagctccttgggagggaagatccctgtgagatggacagctccagaggccatcgcctaccgcaagttcacttcagccagcgacgtttggagctatgggatcgtcatgtgggaagtcatgtcatttggagagagaccctattgggatatgtccaaccaagatgtcatcaatgccatcgagcaggactaccggctgcccccacccatggactgtccagctgctctacaccagctcatgctggactgttggcagaaggaccggaacagccggccccggtttgcggagattgtcaacaccctagataagatgatccggaacccggcaagtctcaagactgtggcaaccatcaccgccgtgccttcccagcccctgctcgaccgctccatcccagacttcacggcctttaccaccgtggatgactggctcagcgccatcaaaatggtccagtacagggacagcttcctcactgctggcttcacctccctccagctggtcacccagatgacatcagaagacctcctgagaataggcatcaccttggcaggccatcagaagaagatcctgaacagcattcattctatgagggtccagataagtcagtcaccaacggcaatggcatgagaactcttgtttcttggggaaggagaggagggaaaaggaccagggtcaagggggaccagaggttgaccactgtggaatgtactggagagactggcttctcagctgaggaatgcatttccatcagtgaagaatcaaccggacctgttgctagcaggcaatctccatttctcagtgacagaagcatgtttgagatgccgtgggaaaccaaatatataataataaaaatataaaaaggtgatgttcaacagaagtgaagacaaaacaatatgcatcaggagaacaagagtaaacccagctcccattctcagtgggctgcagttgcccaaccacaggaagaaagggaaggaggtagagggaagaaacagaagcagtgttccattttcttcctcaccaatgacattcttttcttttctcctttcgtactcctccctgagagtcccctcccttctcccacactcgtttccctttgctcatgactcctgtagggaagtttcttcaaacaaaacccagctcctgagtctccagatgttgttctgtcagttgccaaaggactttgctgaccactgcatggggatccaaccaattcaattaatgtcttcatattgaagaagagatgtaccttcaattgaaaacctcgtttttcttttgtttgcattttctgcaaaaaggaaaaagaaaccacaaattggggaaaaaaaaagaagaaaaacctgtttccgtgtgcaaaagcacacatatgtatgtctgtgttataaaatgactgtgcttgttcgtaacagatgcaaacaagaaagaagaactgggaagtctttgtccctaggaaatccaaaggggctggaatatggtgttggtttggctttctggttggcccaatcggcctattggctcaatgggaagagaggagagggagaaaaataaaatgaaaggaaaaaaaaaagtttgcaaattcagacaggaaacaggtgagtggtttgaattggatgcagtgtgggccatcctggaatgatactgactgattaattattcctgataacatctcaagaaaaggagaaggaaagtgtttctggagaatgttctttcacatcactggaatctgcaattcaagaagtgacaagggagaattcttgctttacctatggactggcttaagccgtgtggcatccgaggaatgtttcaaatgtgtctgtgtttctctttacattccttgttgtacctcattgttcaattcacttttgtaaattccacctaacatttaattattttaaatttctccttttaccttaatctccttgctaattttatctgtctaattaaaaagagcagaagcatgtctgggtttacgtaaaa

SEQ ID NO: 149 - DNA, 1176 bp, Homo sapiens
ggagccgctgagaaagcgcagagaaggcgggccccgtctgaggtctggcagtcagagacagccgggcgcccacggcccgagcgcccacggcagcaccatgcccgcactcctggagcgccccaagctttccaacgccatggccagggcgctgcaccggcacattatgatggagcgggagcgcaagcggcaggaggaagaagaggtggataagatgatggaacagaagatgaaggaagaacaggagagaaggaagaaaaaggagatggaagagagaatgtcattagaggagaccaaggaacaaattctgaagttggaggagaagcttttggctctacaggaagagaagcaccagcttttcctgcagctcaagaaagttttacatgaggaagaaaaacggaggcgaaaggaacagagtgacctgaccaccctaacatcagctgcataccagcagagcctgactgttcacacaggaactcatctcctcagcatgcaggggagccctggaggacacaatcgcccaggcaccctcatggcagctgacagagccaaacaaatgtttggaccccaagtgcttacgacccggcactacgtgggctcagcagctgcttttgcagggacaccagagcatggacaattccaaggcagtcctggtggtgcctatgggactgctcagcccccacctcactatgggcccacacagccagcttatagtcctagtcagcagctcagagctccttcggcattccctgcagtgcagtacctatctcagccacagccacagccctatgctgtgcatggccactttcagcccactcagacaggtttcctccagcctggtggtgccctgtccttgcaaaagcagatggaacatgctaaccagcagactggcttctccgactcatcctctctgcgccccatgcacccccaggctctgcatccagcccctggactccttgcttccccccagctccctgtgcagatgcagccagcaggaaagtcgggctttgcagctaccagccaacctggccctcggctccccttcatccaacacagccagaacccgcgattctaccacaagtgaccatcagattatatcttcaacaccacaccccccaccccatcgtgggtgagggtatcccctgtgtgtcccaggccaataaaatctacctgccactg

SEQ ID NO: 150 - DNA, 4013 bp, Homo sapiens
acagacttcctgttttgcctgctagcatctccctgtaactctcccaatcttgaggagtgatccctgtcccagcccctggaaaggggcaggaacgacaaactcaaagtccaggatgttcaccatgacaagagccatggaagaggctctttttcagcacttcatgcaccagaagctggggatcgcctatgccatacacaagccatttcccttctttgaaggcctcctagacaactccatcatcactaagagaatgtacatggaatctctggaagcctgtagaaatttgatccctgtatccagagtggtgcacaacattctcacccaactggagaggacttttaacctgtctcttctggtgacattgttcagtcaaattaacctgcgtgaatatcccaatctggtgacgatttacagaagcttcaaacgtgttggtgcttcctatgaatggcagagcagagacacaccaatcctacttgaagccccaactggcctagcagaaggaagctccctccataccccactggcgctgcccccaccacaaccccctcaaccaagctgttcaccctgtgcgccaagagtcagtgagcctggaacatcctcccagcaaagcgatgagatcctgagtgagtcgcccagcccatctgaccctgtcctgcctctccctgcactcatccaggaaggaagaagcacttcagtgaccaatgacaagttaacatccaaaatgaatgcggaagaagactcagaagagatgcccagcctcctcactagcactgtgcaagtggccagtgacaacctgatcccccaaataagagataaagaagaccctcaagagatgccccactctcccttgggctctatgccagagataagagataattctccagaaccaaatgacccagaagagccccaggaggtgtccagcacaccttcagacaagaaaggaaagaaaagaaaaagatgtatctggtcaactccaaaaaggagacataagaaaaaaagcctcccaggagggacagcctcatctagacacggaatccaaaagaagctcaaaagggtggatcaggttcctcaaaagaaagatgactcaacttgtaactccacggtagagacaagggcccaaaaggcgagaactgaatgtgcccgaaagtcgagatcagaggagatcattgatggcacttcagaaatgaatgaaggaaagaggtcccagaagacgcctagtacaccacgaagggtcacacaaggggcagcctcacctgggcatggcatccaagagaagctccaagtggtggataaggtgactcaaaggaaagacgactcaacctggaactcagaggtcatgatgagggtccaaaaggcaagaactaaatgtgcccgaaagtccagattgaaagaaaagaaaaaggagaaagatatctgttcaagctcaaaaaggagatttcagaaaaatattcaccgaagaggaaaacccaaaagtgacactgtggattttcactgttctaagctccccgtgacctgtggtgaggcgaaagggattttatataagaagaaaatgaaacacggatcctcagtgaagtgcattcggaatgaggatggaacttggttaacaccaaatgaatttgaagtcgaaggaaaaggaaggaacgcaaagaactggaaacggaatatacgttgtgaaggaatgaccctaggagagctgctgaagcggaaaaactcggatgaatgcgaggtgtgctgtcaagggggacaacttctctgctgcggtacttgtccacgagtcttccatgaggactgtcacatcccccctgtggaagccaagaggatgctgtggagttgcaccttctgcaggatgaagaggtcttcaggaagccaacagtgccatcatgtatctaagaccctggagaggcagatgcagcctcaggaccagctgattcgagattacggtgagccctttcaggaagcaatgtggttggacctggttaaggaaaggctgattacggaaatgtacacggtggcatggtttgtgcgagacatgcgcctgatgtttcgcaaccataaaacattttacaaggcttctgactttggccaggtaggacttgacttagaggcagaatttgaaaaagatctcaaagacgtgctcggttttcatgaagccaatgacggcggtttctggactcttccttgaccctgttctgtaaagactgaagcatccccacctcaggattcagctgatgggaccctggcttggactgttgattgccagtgagtctgggatgtaattggctgccctcaggacccaaacccagacacttcataggattatcacaccctccatctttattctttctttttacctttaaaagtctatatctacactaaaaaaaaaaaaaattaatacttccttaataccatcagataccccatcatagttcacattctccccactgtctcataagtctttttagagttgatttgttcaaatcaggatctaaacaagttccacacactgcatttggctctcctgtccctatgtctcttttaagctataaattgtcatgtatttattgaagaactcagggttttggtcctattacattttttgcaatctggaattttctggttgcattttcttagtggtatagtcctctcttcctctcattttttgtaagctagaagttagatctagaagcttgctttaactcaggttttgaggggtttgttttgatttgggggttttggggcacatgcaggcttcacaggggaatttagtattattttttatgttaaggttggcagcaggtgcacgtgttatcagcctgatcatctatcacctgatggttttagcaatacctaaatccgtgatatcatcagaggttgcaaaatgatgagattcaggtttttttttacataattattggtcagaattattctgcaaatagcttctctttaacagtattcggttaccttgaaatacaggttgtacaaaaaataggataaatgcttgtttttttatttagcaatgttcaaaataatgaattgatgtcccaatatcctctaaaggtaaccagggattttttaatttaattatcttgaacccacatatttaaatatacgtagcatgctacaaaccattgcagttaatacctttattgatgcttgagttgcccactttttctttttttttttttttttttttttttgagacagagtctcactctgtcacccaggccggagtacagtagcgtcatcttgactcactgcaacctcctcctcctgggtgcaagcgattctcctgcctcagcctccgagtagctgggattacaggcatgtgcaagttccccacttttagtgagaaactcctcaatttgcctcctgagttgttttgaaatgaccccagaactctttgatggtgtattagctatctattgctgtgtaacaaatgacctcaaagcttagctgcttaaaaagaaaaaaacattttattgctcactattctgtggatcaagaattcaggcatcatccatgaggatgcttccctttgctccacatggtactggcagaccccattcatacttgcacactgtcacttctgccacaatctattggtgaaagcaagtcacagggacagattcagaaggagggagaatagaccttacctcttgatgcgatgggtggcaaagtcacatttcaaaggagaatgttgcttgggaagaaacattgctgctcccatctttagaagcaatctaccatagttcaccctctggccacagtagttcacatctttcccaaatgcaaaggacactcctctccccacagaagtctcactctctgcagcattggaacaaagtccaggacctccttatctaaatcaggttcagatcagataaagcttcttcgggctgggcacagtggctcacacctgaaatcccagcactttaggaggccgaggcaggtggatcgcttgagtccaggagttgaagaccagcctgggtaacatggcaaaacctcatctctac

SEQ ID NO: 151 - DNA, 7093 bp, Homo sapiens
caacatcaggtaaaagtacagactagccagatcactggttaaccttaacccctatgtgcttgagtttccttatctgtaatatggagatgatatagcaatagctgattttggactgttaaaggaattaagtggacacatgtaaagtgcttagaattgtgcctggcaagtagtaggctgcaatattgtgatataataaatatatatatttgatcttcatccagttcctggcacagatctccagaaacccttgtaatttcctgagtgacaggggtgatagaaacatcttttattagaatacttggtcttggttcctgacacaagagcttctaagacctttggaatctccaagtgataagagtgtatgacagtgagctaactggtggctgggatcctttagacaacttcaggatgggggctatcccctgaaagactaaggcatgattagaggtctgggatttgcagccccacgcctcgacctccagagagggtaaaagggctggagattgattaaccaccagttgccagtgatttaaccaatcatgcctaagtgatggcacctccattaaaaaataaaccacaggtttggagagctttcggtttggttaaccccaaccacataccaagaaggcgatgcacctcaaactgcatgaagacaaaaggtcctgtgctcacctgggacccttctggacgttgccctgtgtacctcttcgactgcctgttcatctacgacgaaccccgggtattgaccccagacaacaatgccacttcatattggggacttcgtctgggattccaaggtgcattcattgcaaagttccttaaatattttctcactgcttcctactaaaggacggacagagcatttgttcttcagccacatactttccttccactggccagcattctcctctattagactagaactgtggataaacctcagaaaatggccacccagcagaaagcctctgacgagaggatctcccagtttgatcacaatttgctgccagagctgtctgctcttctgggcctagatgcagttcagttggcaaaggaactagaagaagaggagcagaaggagcgagcaaaaatgcagaaaggctacaactctcaaatgcgcagtgaagcaaaaaggttaaagacttttgtgacttatgagccgtacagctcatggataccacaggagatggcggccgctgggttttacttcactggggtaaaatctgggattcagtgcttctgctgtagcctaatcctctttggtgccggcctcacgagactccccatagaagaccacaagaggtttcatccagattgtgggttccttttgaacaaggatgttggtaacattgccaagtacgacataagggtgaagaatctgaagagcaggctgagaggaggtaaaatgaggtaccaagaagaggaggctagacttgcgtccttcaggaactggccattttatgtccaagggatatccccttgtgtgctctcagaggctggctttgtctttacaggtaaacaggacacggtacagtgtttttcctgtggtggatgtttaggaaattgggaagaaggagatgatccttggaaggaacatgccaaatggttccccaaatgtgaatttcttcggagtaagaaatcctcagaggaaattacccagtatattcaaagctacaagggatttgttgacataacgggagaacattttgtgaattcctgggtccagagagaattacctatggcatcagcttattgcaatgacagcatctttgcttacgaagaactacggctggactcttttaaggactggccccgggaatcagctgtgggagttgcagcactggccaaagcaggtcttttctacacaggtataaaggacatcgtccagtgcttttcctgtggagggtgtttagagaaatggcaggaaggtgatgacccattagacgatcacaccagatgttttcccaattgtccatttctccaaaatatgaagtcctctgcggaagtgactccagaccttcagagccgtggtgaactttgtgaattactggaaaccacaagtgaaagcaatcttgaagattcaatagcagttggtcctatagtgccagaaatggcacagggtgaagcccagtggtttcaagaggcaaagaatctgaatgagcagctgagagcagcttataccagcgccagtttccgccacatgtctttgcttgatatctcttccgatctggccacggaccacttgctgggctgtgatctgtctattgcttcaaaacacatcagcaaacctgtgcaagaacctctggtgctgcctgaggtctttggcaacttgaactctgtcatgtgtgtggagggtgaagctggaagtggaaagacggtcctcctgaagaaaatagcttttctgtgggcatctggatgctgtcccctgttaaacaggttccagctggttttctacctctcccttagttccaccagaccagacgaggggctggccagtatcatctgtgaccagctcctagagaaagaaggatctgttactgaaatgtgcgtgaggaacattatccagcagttaaagaatcaggtcttattccttttagatgactacaaagaaatatgttcaatccctcaagtcataggaaaactgattcaaaaaaaccacttatcccggacctgcctattgattgctgtccgtacaaacagggccagggacatccgccgatacctagagaccattctagagatcaaagcatttcccttttataatactgtctgtatattacggaagctcttttcacataatatgactcgtctgcgaaagtttatggtttactttggaaagaaccaaagtttgcagaagatacagaaaactcctctctttgtggcggcgatctgtgctcattggtttcagtatccttttgacccatcctttgatgatgtggctgttttcaagtcctatatggaacgcctttccttaaggaacaaagcgacagctgaaattctcaaagcaactgtgtcctcctgtggtgagctggccttgaaagggtttttttcatgttgctttgagtttaatgatgatgatctcgcagaagcaggggttgatgaagatgaagatctaaccatgtgcttgatgagcaaatttacagcccagagactaagaccattctaccggtttttaagtcctgccttccaagaatttcttgcggggatgaggctgattgaactcctggattcagataggcaggaacatcaagatttgggactgtatcatttgaaacaaatcaactcacccatgatgactgtaagcgcctacaacaattttttgaactatgtctccagcctcccttcaacaaaagcagggcccaaaattgtgtctcatttgctccatttagtggataacaaagagtcattggagaatatatctgaaaatgatgactacttaaagcaccagccagaaatttcactgcagatgcagttacttaggggattgtggcaaatttgtccacaagcttacttttcaatggtttcagaacatttactggttcttgccctgaaaactgcttatcaaagcaacactgttgctgcgtgttctccatttgttttgcaattccttcaagggagaacactgactttgggtgcgcttaacttacagtactttttcgaccacccagaaagcttgtcattgttgaggagcatccacttcccaatacgaggaaataagacatcacccagagcacatttttcagttctggaaacatgttttgacaaatcacaggtgccaactatagatcaggactatgcttctgcctttgaacctatgaatgaatgggagcgaaatttagctgaaaaagaggataatgtaaagagctatatggatatgcagcgcagggcatcaccagaccttagtactggctattggaaactttctccaaagcagtacaagattccctgtctagaagtcgatgtgaatgatattgatgttgtaggccaggatatgcttgagattctaatgacagttttctcagcttcacagcgcatcgaactccatttaaaccacagcagaggctttatagaaagcatccgcccagctcttgagctgtctaaggcctctgtcaccaagtgctccataagcaagttggaactcagcgcagccgaacaggaactgcttctcaccctgccttccctggaatctcttgaagtctcagggacaatccagtcacaagaccaaatctttcctaatctggataagttcctgtgcctgaaagaactgtctgtggatctggagggcaatataaatgttttttcagtcattcctgaagaatttccaaacttccaccatatggagaaattattgatccaaatttcagctgagtatgatccttccaaactagtaaaattaattcaaaattctccaaaccttcatgttttccatctgaagtgtaacttcttttcggattttgggtctctcatgactatgcttgtttcctgtaagaaactcacagaaattaagttttcggattcattttttcaagccgtcccatttgttgccagtttgccaaattttatttctctgaagatattaaatcttgaaggccagcaatttcctgatgaggaaacatcagaaaaatttgcctacattttaggttctcttagtaacctggaagaattgatccttcctactggggatggaatttatcgagtggccaaactgatcatccagcagtgtcagcagcttcattgtctccgagtcctctcatttttcaagactttgaatgatgacagcgtggtggaaattgccaaagtagcaatcagtggaggtttccagaaacttgagaacctaaagctttcaatcaatcacaagattacagaggaaggatacagaaatttctttcaagcactggacaacatgccaaacttgcaggagttggacatctccaggcatttcacagagtgtatcaaagctcaggccacaacagtcaagtctttgagtcaatgtgtgttacgactaccaaggctcattagactgaacatgttaagttggctcttggatgcagatgatattgcattgcttaatgtcatgaaagaaagacatcctcaatctaagtacttaactattctccagaaatggatactgccgttctctccaatcattcagaaataaaagattcagctaaaaactgctgaatcaataatttgtcttggggcatattgaggatgtaaaaaaagttgttgattaatgctaaaaaccaaattatccaaaattattttattaaatattgcatacaaaagaaaatgtgtaaggcttgctaaaaaacaaaacaaaacaaaacacagtcctgcatactcaccaccaagctcaagaaataaatcatcaccaatacctttgaggtccctgagtaatccaccccagctaaaggcaaacccttcaatcaagtttatacagcaaaccctccattgtccatggtcaacagggaaggggttggggacaggtctgccaatctatctaaaagccacaatatggaagaagtattcaatttatataataaatggctaacttaacggttgaatcactttcatacatggatgaaacgggtttaacacaggatccacatgaatcttctgtgggccaagagatgttccttaatccttgtagaacctgttttctatattgaactagctttggtacagtagagttaacttactttccatttatccactgccaatataaagaggaaacaggggttagggaaaaatgacttcattccagaggcttctcagagttcaacatatgctataatttagaattttcttatgaatccactctacttgggtagaaaatattttatctctagtgattgcatattatttccatatcatagtatttcatagtattatatttgatatgagtgtctatatcaatgtcagtgtccagaatttcgttcctaccagttaagtagttttctgaacggccagaagaccattcgaaattcatgatactactataagttggtaaacaaccatacttttatcctcatttttattctcactaagaaaaaagtcaactcccctccccttgcccaagtatgaaatatagggacagtatgtatggtgtggtctcatttgtttagaaaaccacttatgactgggtgcggtggctcacacctgtaatcccagcactttgggaggctgaggcgggcgaatcatttgaggtgaggaattcgagaccagcctggccagcatggtgaaaccccatctctactaaaaatacaaaaattagccaggtgtggtggcacatgcctgtagtcccagccactagggcggctgagacgcaagacttgcttgaacccgggaggcagaggttgcagtgagccaagatggcgccactgcattccagcctgggcaacagagcaagaccctgtctgtctcaaaacaaaaaacaaaaccacttatattgctagctacattaagaatttctgaatatgttactgagcttgcttgtggtaaccatttataatatcagaaagtatatgtacaccaaaacatgttgaacatccatgttgtacaactgaaatataaataattttgtcaattatacctaaataaaactggaaaaaaatttctggaagtttatatctaaaaatgttaatagtgcgtacctctaggaagtgggcctggaagccattcttacttttcagtctctcccattctgtactgttttttgttttactttcgtgcctgcattatttttctatttaaaacaaaaataaatctagtttagcactaaaatattaactggagctacctctggagggcaagagtactagaaggtgggatggattgtcttcttgcttgtctgattttatatgtaatacctttgtaattagaaaggttgttaagcattatatcagaatccagtcaggagacagaaaccacacagaaatttgaatggggaaagtttaatatacagatgctcggcctgacgcagtggctcacgcctgtaattccagcactttgggaggccgaggtgggcagatcacttgaggtcaggagttcgagaccagcctggccaacatggtgaaatcctgtctctactaaaaat

SEQ ID NO: 152 - DNA, 2344 bp, Homo sapiens
agtaaccgctgggtggacctggccagcgctccgaaccttgtcctcgctgcgcgccggcccctcggagccccacagcccgggaaggaggccgccgcgggccgggcgcccgctctgccaagcggacccgcaacccggaaaggcggcgcggcggagcctggagccggatcctgctcagaccgggccccggccggccagagccgcgggcatgtcggaggcgcggaaggggccggacgaggcggaggagagccagtacgactctggcattgagtctctgcgctctctgcgctccctacccgagtccacctcggctccagcctccgggccctcggacggcagcccccagccctgcacccatcctccgggacccgtcaaggaaccacaggagaaggaagacgcggatggggagcgggctgattccacctatggctcctcctcgctcacctacaccctgtccttgctggggggccccgaggctgaggacccggccccacgcctgccactcccccacgtgggggcgctgagccctcagcagctggaagcactcacttacatctccgaggacggagacacgctggtccacctggcagtgattcatgaggccccagcggtgctgctctgttgcctggctttgctgccccaggaggtcctggacattcaaaataacctttaccagacagcactccatctggctgtacatctggaccaaccgggcgcagttcgggcactggtgctgaagggggccagccgggcactacaggaccggcatggtgacacagcccttcatgtggcctgccagcgccagcacttggcctgtgcccgctgcctgctggaagggcggccagagccaggcagaggaacatctcactctctggacctccagctgcaaaactggcaaggtctggcttgtctccacattgccacccttcagaagaaccaaccactcatggaattgctgcttcggaatggagctgacattgatgtgcaggagggcaccagtggtaagacagcgctgcacctggctgtggaaacccaagagcggggcctggtacagttcctgctccaggctggtgcccaggtagatgcccgcatgctgaacgggtgcacacccctgcacctggcagctggccggggtctcatgggcatctcatccactctgtgcaaggcgggtgctgactccctgctgcggaatgtggaggatgagacgccccaggacctgactgaggaatcccttgtccttttgccctttgatgacctgaagatctcagggaaactgctgctgtgtaccgactgaagccaggcagggtctgggatcctcagggctccacctctccatctggaagccggagccataactgctgcagtttgggcccaggctatgtgctcttctggtgccctagggactgctgtggccagagcctggggccagccagtacagtcctgagccgaggaggagggactgcaagtggaagagagccagtctggaaggaagagctttccaggtggacagggcttcttggaagacccccaaagccccaggtatcctgggtgaagcctgtttgcctctcttgaaaatggcaggtgctcttgttttacccatgttgggtcagcctgaaactgccaaccagtaggaagcatggactctcctgagtgagaagagactgaaataggagcaagcagaaccctgagaggtgtcccatcttattgctgttgaggaccctgaaacaccgttgtttaaagacttcacacagaaggctctgaactgagccactggggaagggaagtttcagtaacatgacactaaaatggcagagacgttaaaaaaagtttttcccttctagagctgttttgcgcgcatgcatgtctgtgtgcattggggctttttagacaggcctgccctgtgactttgtggtagaggcagagagaaggaaattgtcccctgagcacggtagggccttgctgggtggggtcagaggccagtagttccaggcctttctctgtgtccagcacagacccttgtccttgctgtggaaatgatgagggatggagggacaagaggaagaatgagaggacacacgccctggagccctcaccactgccctgggggttgccatctggaggagcctggggataagggtaacccagggaggctgggcacgagggagctgactccacgtttttccccccgttcctcaccttcgagggccctgctaggtcacccctatgctggcatgaagagcatggggcaataaaccagcacagtctctgaccacttggagcgtctcatccagtgagagagacagccgttaaaagcataaacatccaaataaagatgcctttccaagtt

SEQ ID NO: 153 - DNA, 758 bp, Homo sapiens
ccttcagcataaaagctgatccacaaacaagaggagcaccagacctcctcttggcttcgagatggcttcgccacaccaagagcccaaacctggagacctgattgagattttccgccttggctatgagcactgggccctgtatataggagatggctacgtgatccatctggctcctccaagtgagtaccccggggctggctcctccagtgtcttctcagtcctgagcaacagtgcagaggtgaaacgggagcgcctggaagatgtggtgggaggctgttgctatcgggtcaacaacagcttggaccatgagtaccaaccacggcccgtggaggtgatcatcagttctgcgaaggagatggttggtcagaagatgaagtacagtattgtgagcaggaactgtgagcactttgtcacccagctgagatatggcaagtcccgctgtaaacaggtggaaaaggccaaggttgaagtcggtgtggccacggcgcttggaatcctggttgttgctggatgctcttttgcgattaggagataccaaaaaaaagcgacagcctgaagcagccacaaaatcctgtgttagaagcagctgtgggggtcccagtggagatgagcctcccccatgcctccagcagcctgaccctcgtgccctgtctcaggcgttctctagatcctttcctctgtttccctctctcgctggcaaaagtatgatctaattgaaacaagactgaaggatcaataaacagccatctgccccttca

SEQ ID NO: 154 - DNA, 8034 bp, Homo sapiens
agccgccgccgctgccaccgcctacagagcctgccttgcgcctggtgctgccaggaagatgcggccggagcccggaggctgctgctgccgccgcacggtgcgggcgaatggctgcgtggcgaacggggaagtacggaacgggtacgtgaggagcagcgctgcagccgcagccgcagccgccgccggccagatccatcatgttacacaaaatggaggactatataaaagaccgtttaatgaagcttttgaagaaacaccaatgctggttgctgtgctcacgtatgtggggtatggcgtactcaccctctttggatatcttcgagatttcttgaggtattggagaattgaaaagtgtcaccatgcaacagaaagagaagaacaaaaggactttgtgtcattgtatcaagattttgaaaacttttatacaaggaatctgtacatgaggataagagacaactggaatcggccaatctgtagtgtgcctggagccagggtggacatcatggagagacagtctcatgattataactggtccttcaagtatacagggaatataataaagggtgttataaacatgggttcctacaactatcttggatttgcacggaatactggatcatgtcaagaagcagccgccaaagtccttgaggagtatggagctggagtgtgcagtactcggcaggaaattggaaacctggacaagcatgaagaactagaggagcttgtagcaaggttcttaggagtagaagctgctatggcgtatggcatgggatttgcaacgaattcaatgaacattcctgctcttgttggcaaaggttgcctgattctgagtgatgaactgaatcatgcatcactggttctgggagccagactgtcaggagcaaccattagaatcttcaaacacaacaatatgcaaagcctagagaagctattgaaagatgccattgtttatggtcagcctcggacacgaaggccctggaagaaaattctcatccttgtggaaggaatatatagcatggagggatctattgttcgtcttcctgaagtgattgccctcaagaagaaatacaaggcatacttgtatctggatgaggctcacagcattggcgccctgggccccacaggccggggtgtggtggagtactttggcctggatcccgaggatgtggatgttatgatgggaacgttcacaaagagttttggtgcttctggaggatatattggaggcaagaaggagctgatagactacctgcgaacacattctcatagtgcagtgtatgccacgtcattgtcacctcctgtagtggagcagatcatcacctccatgaagtgcatcatggggcaggatggcaccagccttggtaaagagtgtgtacaacagttagctgaaaacaccaggtatttcaggagacgcctgaaagagatgggcttcatcatctatggaaatgaagactctccagtagtgcctttgatgctctacatgcctgccaaaattggcgcctttggacgggagatgctgaagcggaacatcggtgtcgttgtggttggatttcctgccaccccaattattgagtccagagccaggttttgcctgtcagcagctcataccaaagaaatacttgatactgctttaaaggagatagatgaagttggggacctattgcagctgaagtattcccgtcatcggttggtacctctactggacaggccctttgacgagacgacgtatgaagaaacagaagactgagcctttttggtgctccctcagaggaactctccctcacccaggacagcctgtggcctttgtgagccagttccaggaaccacacttctgtggccatctcacgtgaaagacattgcctcagctactgaaggtggccacctccactctaaatgacattttgtaaatagtaaaaaactgcttctaatccttcctttgctaaatctcacctttaaaaacgaaggtgactcactttgctttttcagtccattaaaaaaacattttattttgcaaccattctacttgtgaaatcacgctgaccctagcctgtctctggctaaccacacaggccattcccctctcccagcaccttgcagacttgggcccatcaagagctactgctggccctggctccgcagcctggatacttacctggccctcctccctagggagcaagtgccttccacttacttcccatccaggtctcagaggtctcaaggccaaccttggaatccttatttaaccattcaagtaatcaacggaagttttcaccctttaatcttaagtttagccttttaagaaaaacagtaagcgatgactgctgaaaggctcattgtgtaatctcccaagggtttggtcttattccattttcttctggtcaccagatgatttcttcctttaccatcaaatacttcttcataatggtcacagtctgaggatgtgcgcaaattctggttcttcccaagctctaaccgtaacacgtcccaccccctttttaaagcacttactgttttcagagcacccatatcccaccctggtgagaaggccactctcacatctgagtgttgggtacaaagctgctccgtagagtgatgtgcactcctggtgggtgaggggcaggggcagtggcagtgtgcaaagaattgattactccttgcagagcctgtggcttgcatttcctactgctttctacgtttgaaaattatgacagtctctggctaggtctgggtccagattaggatttaaactgataaaggaaactgttggtaaatcctctgctcagaaagcatttatcatgttcctatttaaggattaggtttattaatttaggcctcttagaagctaacccacttaaatattactcttctgaatgctagttctcttttattcttgatgtcctaagtcaattgaatctggcatctggggctagggtctgcctgtctacatattttttatttttttctgagaaattctgaacacatagatctctttcctaaactgacattttctattttgactgttttcatactataaccaggtaaagggacttctttcagagagctttatactgcctgaccaaagaacaaatctgaaaatcaccattttaaagttattttttcagttgaaccaaagtttaagtgaagaggacttttggcatattatacccaggatcagtttgtctttttgtatccatcaagtattacaggagaaggattgggaacagaatggaaaaacagtgtatgaaagtcatgttacaggccgagtgcggtggctcacacctgtaatcctagcactttgggaggctgaggcaggtggctcacttgaggtcaggaattcaagaccagcctggccaacatggtgaaaccccgtctctactaaaaagacaaaaaattagctgggcgtggtggcgggcacctataatcccacctacttggtaggctgaggcaggagaatcgcttgaacccaggaggcggaggttgcagtgagacgagattgtgccactgcactctagcctgggtgacagagcaaaactgtgtctcaaaaaaaaaagtcatgttacacatttaagtttttgaaattgctccttttatcggtaaagattctcaatccaaattctcctgggtgtgttgtcatcagctgtgatatgtttgtgcacattacgtatagcagaggatgtaagcaatattattgtttgtgaagttttgtttttaatgtcttgagtatgagttatgtttagtcactgtcagcatctgagaactttaataagcccttgagatattccaaagttttattttacttttttaaagaacagaaaaagatgaatgaaagaaccaaggagagatgcagagactatatttagcatgtataggttaaagtaagaaggaggttgtggtaactaaataggagtcctataaaatcaaatacattgtcaaccttttctgcacatctagtttcctaccatagaatcccactggaataccacatagcttttgcactgcagttactatttactaatgtaaacgtagggtttgtaaaagtcacaaacttataagcaatgaacttacctgctagtctttttattttggcttgcatgaagtcactgcaaattcaaatgtcagtaccggcatttaaaatatatctatatcactttgttggtacaaagttatttcaagataagtgtaattttgttacaagtttattttgaagagacaaatctcctgtgatctatgcaggacctctgtactttctaaagaacaaaatgttatgtagacattatacatggttggttgtctcttcttgaaactgtaatgtaaatctagggtccagtcatatcctaggtatcatcatttatccaagtacttggaggaatacaagtatatataaatacagtcattgagaataagtcgatttgaggcatacaagagtagtttcttacacagtttaacacggcctgattcaagactctgataggattcaaacagataccggttaaccatgactaccaaaactgatcatctgagtcgattgatagaggtgtgactagtccttagcactttttctcattcctctttttattcagcattgctgttacctatttcaggtttataagacctctttcagcagatcacatcagaagccaggaaatgcatagctaggagatgtcaaaagcccatatgaggagtggaccaagcagcagtggcggtttctcctcgcatctttttttttttaagctttaacttagcaggggcatggactttatagcactttttcaactttttgctttgctttggataagaaatccttacctttaaaaaaagcttctagtctccataacccccaaagtactgcttatttgtttgaagaatccagccatcgtagtgctttagtcactatcgtaaacattcatgatagggcaaggattttaaaacaggattcttgcttctgtagtcatcaaggtgaacagaagcatcctacacaaccactaagggctctatgtttgtgtcatgcctcttcaaacaccaaggagttgaacatgcttccagtgatttgtctccgtaatgccttcttcctttatttggcctttctttctttctgtaccttcaagttcttgatttttaaaattccaactctagagaaaaccaatatatggtggtgctgggctttgaagatagcatatcagacgccttggttctgtttgtacacttagccttacatttcaggaggaggcttttcattaggggcttaagctagctcctttggcttttaaaaaaaattttttttcaaatttcttcattacctaagggagcctgcatctaaatttctcaactagttcagcctagctgaattttctagtgtgttatacactttgcttccttcttattggtgaaaaccagggggatgagtggcttccatggagagatttcctgatttctcagggaggaaaaaagtgatgacatttaccactacttttatgtttttcccctttttccaaattgataaggatttctggttcctagtgatccgggattgggcaacagtgcagaactgccagtcatgccgtaggccgtgaagaaagaatgtgagtaactgttgttttgcaaggatttgtagggttatgggcagttgttgtttgaagcattgctatgacctaattcccaaggtatctttcctctcttggtgttctaggtaagccaatgagctttaatctctacttgctataaccgtgtgcttagaaaaagaggtgagagtagtggttttccttcaaactgtccacattcatgaagattatgaattgttaggacagccagggcaagatagaccctgtctctacaaaaatttttttctaaattaaccgggcatggtggtgcctgcctgtagtcccacctgtgtgggagaatcacttgagcctgggaggtcaaggctgcagtgagccatgattgcacccctgcactccagcctgggtgacagagtgagaccctggctcaataagagggggaaaaaaaattgttaggagctgggtgcggatgcagcctgcaatcccagctacttgagaggctgaggccggaggattgcttaaacccaagaatttgagcgtagcctgggcaacacagcaagaccccatctaagaaaaaaatgttttttaaatcagcttagcccaaaggggttgtgaatggggaggtataaaaagcaaagattattttttggctactaagccaagaacttacagggattttttttttcagtcccagaacctacagataccctgctacttgcttcacgtggatgctcagtgcccagcagccatcttaatacattaaaccagtttaaaaaataccttccatgtggagaaaaacatgtctttttctcgcctcaactttatccacatgaaatatgtgcccatggctgggcgcagtggctcacctgtaatcccaacactttgggaggctgaagcaggcagattgcttgaggccaggagttcgagaacagtctggccaacatggcgaaacctcatctctactaaaattacaaaaattagccgggcatggtggcacatgcctgtaatcccagctacgtcaggaggctgaggcacaggaattgcttgaacccaagaggcagaggatgcaatgagccaagatcacaccactgcactccagccttggcgacagagggagactctgtctcaaaaaaaaaaaaaaaaggtgtgcccaggcccctagccattgccatgtgcccagccagagagccaaattagagggctggcttccctatcacacagaataaatgctagtgctagccaatgatccctttgcttttaatgtatagaaaatactgttgttccttttgtcatttccagtgacatctgttttctaagcagctcttttctagggaggaaaccaaaggggctaggttaagaccctaatagaaatgttttttctaatctctggtgagtctggaagtgtcacattcacagtccacccttgggagtggcttggtggagctggggacaaggttttgtttactacatagtgcacatgataaatggccttaaactgtgattctttctggtaggataagttataataaactgaccctaaagaatgcaatggcttttaaactgcagttactgtgttcttaatgaagcaatacccaaagctctgttcttttggagcacttgaggggagcttgaatgaaaggtgcagataagagcagtaccttgatcttatgctttctgagtgtcctgccttgttgccatctgcatggatgagtgaatgcttctatgcacgaggagactcaagccaactcagagtctgctttttccaacgctcttcccaggtttcttttgcaaagcttggtcatttggcccaggtcttcctggaaagtggagtacatgtcactgactagggtggcgtggtgtctttacccttaacattaagtcttgttacctcagtgatgtgaagccaatggttggaattataaaaagcatccttgctggttcttcacaggacactggaacccaccctgtcaattcagctagcatgtccacacagtcttgatgatccctctctgtaacaggcagctaacattaagagaagggggaaagagaagaagagagcaatagcttatgggagagctgagatcttacttcgttgacccatatttttcccctgaccaagttacctgtaaactggaatttgcaaggggatgctgtgatgataacccctttctattgctgtaatgttcatataacctgggaaactgagagaaggggatgtgtaaataaaagcttaaacattttagtaatgtgttaaaatgtcactctctcttaccctgtttcccttttttgccagatgatgatttttttatttttattttgtactttactggatgactgtgaagcgatgagtattgggttggggtaggtgtgttgattttgagagtgcatgttaagaactgaaggggaactacttgagatgacttaagaagcatcccatgcaaatatcttgttttgccctaataaaatattcagaaagata

SEQ ID NO: 155 - DNA, 2110 bp, Homo sapiens
agccctctcgtgccgcaccgtagggggcggtgtcggagttctgtctgggcctattcgggtccgagttcggaatttcggttcaaggcccagttcctcggattgttcctgcgcaacttcagtttcccttccaggcacgggcaatgagtgtttggccgcgacgagttggaaagcccggatgcgtccttcggttgggcggggtgtctcagtgacgtcactgggggtataaaagggcctgggtggcgggcgcctgggcagagcgtcctagcagtgtcactgcgtgggttggtttgtgtagagaggcgtgagcgagcccgttgtccggagtgcacctgctgcctgttctgtccctcccgggagcccccgccgctgtcgccgtcgagtcgccatggaagtgcagaaagaggcacagcgcatcatgaccctgtcggtgtggaagatgtatcactcccgcatgcagcgcggtggcctgcggctgcaccggagtctgcagctgtcgctggtcatgcgcagcgcccgggagctctacctctcggccaaggtggaggccctcgagcccgaggtgtcgttgccggccgccctcccctctgaccctcgcctgcacccgccccgagaagccgagtccacggccgagacagcgacccccgacggtgagcacccgtttccggagccaatggacacgcaggaggcgccgacagccgaggagacctccgcctgctgtgccccgcgccccgccaaagtcagccgcaaacgacgcagcagcagcctgagcgacggcggggacgctggactggtcccgagcaagaaagcccgtctggaagaaaaggaagaagaggagggagcgtcatccgaagtcgccgatcgcctgcagccccctccggcgcaagcggagggcgcctttcccaacctggcccgcgtcctgcagaggcgcttctccggcctcctgaactgcagccccgcggcccctccgacggcgccgcccgcgtgcgaggcaaagcccgcttgccgcccggcggacagcatgctcaacgtgctcgtgcgggccgtggtggccttctgaggaccccgagcggcgctgccggagcccagagcgcgcgtcgaaccgtcggcccgagggcgcagacctgaggcgaggccacccccctccatcctgggggaagcgcccgcgaaaaccgtggagagaagccgccgcccgggctgctgagaggcccggagagggactctgtccccggggagccatcgccttcagtgtgcagggacggcaccgaggagtctgagccgggggcgcgggcgccttccgcagagacctgcgcccacaggtgctgtcttagtggactgggacgtgaacctttcgctctccttctggactgggagaagggaggcttgggtgttgtgttttttgttttgtttgtttgtttgtttttaaagatctcctcagggtcggacttcattttgtactgtgggctgtgctggccctttcaaggtttttcaagagttggttttgcgtttccaacctcggagaattccaggcactccccttccccctccgctgacatacttgtataagcggtcatcgttgcgtcatggggcaggcgtggggagcttcctgtcgccttgcgtgggtgtggggcctgggaggaggtcctggggcgtgcacccgccctgggcagtggggaggagagtggcctgagttacttcacccccgcgtgctgctggttaatgtcccgcgtctctgcaccttcgggtgggagcggggactgatctactttcacattctcaagtttttctcatctgcattagaggtgcccagtaggttcccaggttccagcgtgcccctccctcagacacacggacacaatcagccgagaagttcctggtctgaatcacgagaatgtggaggggtggggggtgtcagtggaaaggcataaggctgagctgagaccagttgctggtgaaactgggccaatctggggaggggaacatccttgccagggagtttctgagggtctgctttgtttacctttcgtgcggtggattctttttaactccgtctacctggcgttttgttagaaatgtcagataggaaaataaaaaccatttgagtaaaaaagcc

SEQ ID NO: 156 - DNA, 5745 bp, Homo sapiens
cgtttcctcggcggcctcggagcgcgggtgcagcagttgtgtcccgacccctgggagcgccatggcagagctgtgccccctggccgaggagctgtcgtgctccatctgcctggagcccttcaaggagccggtcaccactccgtgcggccacaacttctgcgggtcgtgcctgaatgagacgtgggcagtccagggctcgccatacctgtgcccgcagtgccgcgccgtctaccaggcgcgaccgcagctgcacaagaacacggtgctgtgcaacgtggtggagcagttcctgcaggccgacctggcccgggagccacccgccgacgtctggacgccgcccgcccgcgcctctgcacccagcccgaatgcccaggtggcctgcgaccactgcctgaaggaggccgccgtgaagacgtgcttggtgtgcatggcctccttctgtcaggagcacctgcagccgcacttcgacagccccgccttccaggaccacccgctgcagccgcccgttcgcgacctgttgcgccgcaaatgttcccagcacaatcggctgcgggaatttttctgccccgagcacagcgagtgcatctgccacatctgcctggtggagcataagacctgctctcccgcgtccctgagccaggccagcgccgacctggaggccaccctgaggcacaaactaactgtcatgtacagtcagatcaacggggcgtcgagagcactggatgatgtgagaaacaggcagcaggatgtgcggatgactgcaaacagaaaggtggagcagctacaacaagaatacacggaaatgaaggctctcttggacgcctcagagaccacctcgacaaggaagataaaggaagaggagaagagggtcaacagcaagtttgacaccatttatcagattctcctcaagaagaagagtgagatccagaccttgaaggaggagattgaacagagcctgaccaagagggatgagttcgagtttctggagaaagcatcaaaactgcgaggaatctcaacaaagccagtctacatccccgaggtggaactgaaccacaagctgataaaaggcatccaccagagcaccatagacctcaaaaacgagctgaagcagtgcatcgggcggctccaggagcccacccccagttcaggtgaccctggagagcatgacccagcgtccacacacaaatccacacgccctgtgaagaaggtctccaaagaggaaaagaaatccaagaaacctccccctgtccctgccttacccagcaagcttcccacgtttggagccccggaacagttagtggatttaaaacaagctggcttggaggctgcagccaaagccaccagctcacatccgaactcaacatctctcaaggccaaggtgctggagaccttcctggccaagtccagacctgagctcctggagtattacattaaagtcatcctggactacaacaccgcccacaacaaagtggctctgtcagagtgctatacagtagcttctgtggctgagatgcctcagaactaccggccgcatccccagaggttcacatactgctctcaggtgctgggcctgcactgctacaagaaggggatccactactgggaggtggagctgcagaagaacaacttctgtggggtaggcatctgctacggaagcatgaaccggcagggcccagaaagcaggctcggccgcaacagcgcctcctggtgcgtggagtggttcaacaccaagatctctgcctggcacaataacgtggagaaaaccctgccctccaccaaggccacgcgggtgggcgtgcttctcaactgtgaccacggctttgtcatcttcttcgctgttgccgacaaggtccacctgatgtataagttcagggtggactttactgaggctttgtacccggctttctgggtattttctgctggtgccacactctccatctgctcccccaagtaggcaggctgtaggcacttgggctgactgcctgcagaagtcccaagaccctagtgaaaatacagcaggcagaactctccttggataattccccaagaggtcccaaggattgggagcatgggaggggagctggcgggagggtgggaggtgggatttagccaggaaaggggtgagagtgattgtgttgtgggcgaggaggcgtttccaccccctggtgcctatcagggcagggtgacctactccccattgttctggaaatctccaggctgctgggcagctgggcagagctctgggaagtgaagtcatgagtgcccgattcctcttagagaaaatccatagctactgtaggttctgtcttgggccacttggatctgaaggctgcccctttgctctctggggtagccttcagatcttggtgttttgaattcttactatagatgtttttaaagttccaaagtcattgagtttcaatgttacataaactccattacccgcatgttggggcttgatctcctggttattatctgtgcttgaggaaacacccacagcagtctctacccagaacagtttcctaaagaggcataccctcttcctccactggaaaatagtgcgttcccttcctaccctgcacacccatcgcccccacattgatggttttcaaacagcaaacttttcagctaaagcttcaaaccatgattggaatcagcctgtgttggatttgtgattcagggtcatggtgaccctgatccagtttgggtggaaatccttcctaagtatcataagaagcatcttggcagagatgctttggtggcagccatgagctttgctggaggccttgcttcccatagccttggctgtggggcaaggaactctgccaggcgagggggatgctgccctggatcaacagaagcctggtgggtttgctcgtgttagagtgtcctgccttcttactgacaactcttctcggtgatagcctctcttccctggattgtgacatatggaatgacagtgcaggtaccaccgaggctagcacagtcaagcctccagctaagctggatccctgaagcctgctatcatgcagacaggctatgcggctgcctcggaccatgctaggccacttgctggggtgtcaacctaccaccaaaggggtcttttagcaaacctcatggggaacaggaacattcctgttcatccctggccacaggctgcagacccagcactggcccttgcgtgagtcagagcctggggctggccctagccccttctactgacttcctcatttaagccaattatataagctcacattgatcagggagggagggaaagagctaaagagggtcacacaagtggctattttccctgcagtgtttctgtgtggtgaaaataacccagtccactaaggggcgggagtgaatggatggctggattttccccaagctccttatagcctaatgttgtcaggatgtgagtatgaggaatttagcctcttatagtgaaatgagtccaactctgggctttgcttagaggagagctcctgtcaggcttcctataatatgaaaagaagtcaccattggggaactagagaccccagaccttttcatatggatatttgagaatgtaatgcatctcaggcctcgtgctggaactctagggcactctaggcaggctcagaacacttgatattcctgacagctacacacctgacatgcaggtacatacctgatcggtgtcatctcctaacaaggattttcagttcctcgggagagcaataatctttgtaggaaagacatccctgcaataggtgatatgtggtccttagaagttttattcctttactacttggaagaaaagttctttggtgattcttctctgcttttgaagatgatcaaaagcatcttcattgattttctgaaacgaaagccttgtctgaaaccaattaatacttgggaaacagctgggcttggaggagtagaatgccagagataaatccatggctcctgctctggctctcttctgcagaaatgagggcaacagtgaggccacttccctggcaaatgtgcagctcaggatagggaagcataagaccctctgtttaaaagagagtcaagtaggtaaccaaagccaagctctgtgcaaggtgctttggagttgtaaattgaggagtgcatccttgctgtcttgaaccattctgtttgcaatggtgagaccttacataacctagccttgcagggccgccacacaaccctggagtcctagagttggaggaacctttgtatccatctgacttctcattttgcagaatatgatgagaaagtagaggatcgctctgttcaccactcttgctattccattagtggggagatgcctgctagcatgtgtgaggggaacactctgatacactgggaagtatcggaaattcccagaaacacaaacataaaataactctcctagacccaggtactggggactgtctcagtccgtgtggcatgataaataaaaggttaggatcaagtctttgtatttttcaagatgtggtagctgattattcctgttttaagtactctgaaattgatctgtgatcaataatactaatatgttatcttttaccgtattctgcctctcactattgattttaattagttaggagtatttgagctgttatttcttgagcttaatatttttttagagttaactctttaaggagataatcatggctgtagacaaggccagggctggctgacgtgccttagaaggtttgaatgcaataaagcggtgtttggcgttctcctgcattgtagtgcgggtacaaaatgctatttgttcgtcatactgttgtcagcagatgagccgcccactacagacggctactgcccagggacctgcccaggccccacccaagggctcccaagggttgagatttctgcagacctatagccagcacacttagtcctgccctatatagagttcctcttcgggaagcttttgataaggaattctcagaccgataggatgtctgtctgggctttgctgcgggacagtctaactgtgggggctaggggaaagcaggagagtatcgatcaaagagtaagccacacacggataatcagttactagggatggaggtgtgagggttcattatattattcattttactgttgtatatgtttgaaaatgtctataataaaaagctttaaaaaaaaaaaagaaacaaaaatagttcaggccagcaatgggccctccatgttcagtggattttatccttgtttcaattggggtaggagttccaggaggtgtggattggaggttgtctaaagaattgaactggcctttgtccctgcttcctgggagggagactttcagtccttgacatttccagggtaataggagtgtctttgttatttgtgaggccatgggatcacacctgagcttatgctaaaaggtgggatgactcagagctggggctggtcaccagacagactgaccatgtgattagaggtttgaggctttgagtcagcctgacctatggggcgggggactggaggctgagtttaatcatctggccagtgctttaatcagtacatcatgaaaccctaataaaaactctggacactaaagctcagcatagcttcctgggtggtgaagctgtggctatgccggcagggcagtgtgccctaattccacgaagagggggcatgggagcactgtgctcaagacccttccagacctttccctgtgtcttccttggcttgtggagctgatttgtatcctttataataaaactaatcataagtata

SEQ ID NO: 157 - DNA, 637 bp, Homo sapiens
ggcggctgagaggcagcgaactcatctttgccagtacaggagcttgtgccgtggcccacagcccacagcccacagccatgggctgggacctgacggtgaagatgctggcgggcaacgaattccaggtgtccctgagcagctccatgtcggtgtcagagctgaaggcgcagatcacccagaagatcggcgtgcacgccttccagcagcgtctggctgtccacccgagcggtgtggcgctgcaggacagggtcccccttgccagccagggcctgggccccggcagcacggtcctgctggtggtggacaaatgcgacgaacctctgagcatcctggtgaggaataacaagggccgcagcagcacctacgaggtacggctgacgcagaccgtggcccacctgaagcagcaagtgagcgggctggagggtgtgcaggacgacctgttctggctgaccttcgaggggaagcccctggaggaccagctcccgctgggggagtacggcctcaagcccctgagcaccgtgttcatgaatctgcgcctgcggggaggcggcacagagcctggcgggcggagctaagggcctccaccagcatccgagcaggatcaagggccggaaataaaggctgttgtaaagagaaa

SEQ ID NO: 158 - DNA, 1432 bp, Homo sapiens
agcgcggagcacctgcgcccgcggctgacaccttcgctcgcagtttgttcgcagtttactcgcacaccagtttcccccaccgcgctttggattagtgtgatctcagctcaaggcaaaggtgggatatcatggcatctatctgggttggacaccgaggaacagtaagagattatccagactttagcccatcagtggatgctgaagctattcagaaagcaatcagaggaattggaactgatgagaaaatgctcatcagcattctgactgagaggtcaaatgcacagcggcagctgattgttaaggaatatcaagcagcatatggaaaggagctgaaagatgacttgaagggtgatctctctggccactttgagcatctcatggtggccctagtgactccaccagcagtctttgatgcaaagcagctaaagaaatccatgaagggcgcgggaacaaacgaagatgccttgattgaaatcttaactaccaggacaagcaggcaaatgaaggatatctctcaagcctattatacagtatacaagaagagtcttggagatgacattagttccgaaacatctggtgacttccggaaagctctgttgactttggcagatggcagaagagatgaaagtctgaaagtggatgagcatctggccaaacaagatgcccagattctctataaagctggtgagaacagatggggcacggatgaagacaaattcactgagatcctgtgtttaaggagctttcctcaattaaaactaacatttgatgaatacagaaatatcagccaaaaggacattgtggacagcataaaaggagaattatctgggcattttgaagacttactgttggccatagttaattgtgtgaggaacacgccggcctttttagccgaaagactgcatcgagccttgaagggtattggaactgatgagtttactctgaaccgaataatggtgtccagatcagaaattgaccttttggacattcgaacagagttcaagaagcattatggctattccctatattcagcaattaaatcggatacttctggagactatgaaatcacactcttaaaaatctgtggtggagatgactgaaccaagaagataatctccaaaggtccacgatgggctttcccaacagctccaccttacttcttctcatactatttaagagaacaagcaaatataaacagcaacttgtgttcctaacaggaattttcattgttctataacaacaacaacaaaagcgattattattttagagcatctcatttataatgtagcagctcataaatgaaattgaaaatggtattaaagatctgcaactactatccaacttatatttctgctttcaaagttaagaatctttatagttctactccattaaatataaagcaagataataaaaattgttgcttttgttaaaa

SEQ ID NO: 159 - DNA, 1534 bp, Homo sapiens
actggaaaagatagtgaccttaccagggccaaagtttgtagacacaggaattacgaaatggagaagggggagaagtgagctagtggcagcataaaaagaccagcagatgccccacagcactgctcttccagaggcaagaccaaccaagatgagtgccctgggagctgtcattgccctcctgctctggggacagctttttgcagtggactcaggcaatgatgtcacggatatcgcagatgacggctgcccgaagccccccgagattgcacatggctatgtggagcactcggttcgctaccagtgtaagaactactacaaactgcgcacagaaggagatggagtatacaccttaaatgataagaagcagtggataaataaggctgttggagataaacttcctgaatgtgaagcagatgacggctgcccgaagccccccgagattgcacatggctatgtggagcactcggttcgctaccagtgtaagaactactacaaactgcgcacagaaggagatggagtgtacaccttaaacaatgagaagcagtggataaataaggctgttggagataaacttcctgaatgtgaagcagtatgtgggaagcccaagaatccggcaaacccagtgcagcggatcctgggtggacacctggatgccaaaggcagctttccctggcaggctaagatggtttcccaccataatctcaccacaggtgccacgctgatcaatgaacaatggctgctgaccacggctaaaaatctcttcctgaaccattcagaaaatgcaacagcgaaagacattgcccctactttaacactctatgtggggaaaaagcagcttgtagagattgagaaggttgttctacaccctaactactcccaggtagatattgggctcatcaaactcaaacagaaggtgtctgttaatgagagagtgatgcccatctgcctaccttcaaaggattatgcagaagtagggcgtgtgggttatgtttctggctgggggcgaaatgccaattttaaatttactgaccatctgaagtatgtcatgctgcctgtggctgaccaagaccaatgcataaggcattatgaaggcagcacagtccccgaaaagaagacaccgaagagccctgtaggggtgcagcccatactgaatgaacacaccttctgtgctggcatgtctaagtaccaagaagacacctgctatggcgatgcgggcagtgcctttgccgttcacgacctggaggaggacacctggtatgcgactgggatcttaagctttgataagagctgtgctgtggctgagtatggtgtgtatgtgaaggtgacttccatccaggactgggttcagaagaccatagctgagaactaatgcaaggctggccggaagcccttgcctgaaagcaagatttcagcctggaagagggcaaagtggacgggagtggacaggagtggatgcgataagatgtggtttgaagctgatgggtgccagccctgcattgctgagtcaatcaataaagagctttcttttgaccca

SEQ ID NO: 160 - DNA, 1864 bp, Homo sapiens
ctggcggctcttgggactggcggggctgcgcgcggggttagggtgggggtacgggaaggctcaacccaggacctgcgtaccttgctttgggggcgcactaagcacctgccgggagcagggggcgcaccgggaactcgcagatttcgccagttgggcgcactggggatctgtggactgcgtccgggggatgggctagggggacatgcgcacgctttgggccttacagaatgtgatcgcgcgagggggagggcgaagcgtggcgggagggcgaggcgaaggaaggagggcgtgagaaaggcgacggcggcggcgcggaggagggttatctatacatttaaaaaccagccgcctgcgccgcgcctgcggagacctgggagagtccggccgcacgcgcgggacacgagcgtcccacgctccctggcgcgtacggcctgccaccactaggcctcctatccccgggctccagacgacctaggacgcgtgccctggggagttgcctggcggcgccgtgccagaagcccccttggggcgccacagttttccccgtcgcctccggttcctctgcctgcaccttcctgcggcgcgccgggacctggagcgggcgggtggatgcaggcgcgatggacggcggcacactgcccaggtccgcgccccctgcgccccccgtccctgtcggctgcgctgcccggcggagacccgcgtccccggaactgttgcgctgcagccggcggcggcgaccggccaccgcagagaccggaggcggcgcagcggccgtagcgcggcgcaatgagcgcgagcgcaaccgcgtgaagctggtgaacttgggcttccaggcgctgcggcagcacgtgccgcacggcggcgccagcaagaagctgagcaaggtggagacgctgcgctcagccgtggagtacatccgcgcgctgcagcgcctgctggccgagcacgacgccgtgcgcaacgcgctggcgggagggctgaggccgcaggccgtgcggccgtctgcgccccgcgggccgccagggaccaccccggtcgccgcctcgccctcccgcgcttcttcgtccccgggccgcgggggcagctcggagcccggctccccgcgttccgcctactcgtcggacgacagcggctgcgaaggcgcgctgagtcctgcggagcgcgagctactcgacttctccagctggttagggggctactgagcgccctcgacctatgagcctcagccccggaagccgagcgagcggccggcgcgctcatcgccggggagcccgccaggtggaccggcccgcgctccgcccccagcgagccggggacccacccaccaccccccgcaccgccgacgccgcctcgttcgtccggcccagcctgaccaatgccgcggtggaaacgggcttggagctggccccataagggctggcggcttcctccgacgccgcccctccccacagcttctcgactgcagtggggcggggggcaccaacacttggagatttttccggaggggagaggattttctaagggcacagagaatccattttctacacattaacttgagctgctggagggacactgctggcaaacggagacctatttttgtacaaagaacccttgacctggggcgtaataaagatgacctggacccctgcccccactatctggagttttccatgctggccaagatctggacacgagcagtccctgaggggcggggtccctggcgtgaggcccccgtgacagcccaccctggggtgggtttgtgggcactgctgctctgctagggagaagcctgtgtggggcacacctcttcaagggagcgtgaactttataaataaatcagttctgtttaaaaaaaaaaaaaaaa

SEQ ID NO: 161 - DNA, 4201 bp, Homo sapiens
gcgggcctgggcggccagccccggcgcacagccgcggccggggcgcgcggcgcggggcggaaaagcctgtttacacagactgcacaccgcctggggaataatgcagtaaaggaagtgagccggctcggcctgactgctccaacttcctgctctcacacacaccagaggggaaaaaaaaagaggagcgagagaaagaaaaaaagggggaaaaatcaggatctcattacaagagccacagaccgtctgcagacgcctgtcagcatggaaagtcgggggctttcgcccgggtcctcctagaaattccccccgaagaagactcccccacatctgggtatggagagtgcaatcacgctgtggcagttcctgttgcagttgctgctggatcagaaacatgagcatttgatctgctggacctcgaacgatggtgaattcaagctcctcaaagcagaagaagtggccaagctgtggggactccgaaaaaacaaaacaaatatgaactatgataagctgagcagagccctgcgatactattatgacaagaacatcatcaagaaggtgatcgggcagaagtttgtgtacaagtttgtctctttcccggagatcctgaagatggatcctcacgcggtggagatcagccgggagagccttctgctgcaggacagcgactgcaaggcgtctccggagggccgcgaggcccacaaacacggcctggccgccctcagaagcacgagccgcaacgaatacatccactcaggcctgtactcgtccttcaccattaattccctgcagaacccaccagacgccttcaaggccatcaagacggagaagctggaggagccgcccgaagacagcccccccgtggaagaagtcaggactgtgatcaggtttgtgaccaataaaaccgacaagcacgtcaccaggccggtggtgtccctgccttccacgtcagaggctgcggcggcgtccgccttcctggcctcgtccgtctcggccaagatctcctctttaatgttgccaaacgctgccagtatttcatccgcctcacccttctcatctcggtccccgtccctgtcccccaactcacccctcccttctgaacacagaagcctcttcctggaggccgcctgccatgactccgattccctggagcccttgaacctgtcatcgggctccaagaccaagtctccatctcttcccccaaaggccaaaaaacccaaaggcttggaaatctcagcgcccccgctggtgctctccggcaccgacatcggctccatcgccctcaacagcccagccctcccctcgggatccctcaccccagccttcttcaccgcacagacaccaaatggattgcttctgactccgagtccactgctctccagcatacatttctggagcagccttagtccagttgctccgctgagtcctgccaggctgcaagggccaagcacgctgttccagttccccacactgcttaatggccacatgccagtgccaatccccagtctggacagagctgcttctccagtactgctttcttcaaactctcagaaatcctgatgacgtctggccacaattaaggactcattaactgatgaaacaaatttgtccccacgggctagtttacctgtgtcgtgagaaggacattgtgaaactcttgttaatttggtttgcacttttcataacatggatagtctagatttatgttagcattttaaaaactgtttttgatatattcaagtatatatgaaaatctgtttggcattaagtgaattttaatgtttttgtttttatatccttttagctcttaagtgttgaacactgttgacagtgaagaacttttcttaatggttttcagtataactaataaggatgtgaagcttttttctctttagttctgagtatgctaaactgtgtgcttatatagactataaccagttgtgccttccttcgcatttaatgtaaatgaatgatttatatattttttagtattaagaggaaatgtttgaaagatgaaaattagtatcaaacagctctctagtagaatttcattatttttcaccagtgggcaatatgaaagcatatatcacgttttgttttactttcaattgtataagaattgccttagaacctcttttgaactgaaattcagtaaatgtccaagtaatgtttttataataaactaagccatatttagacaataaacattgataaaagaaaatgttctaaagtacattttcaaaagaatggaccttgaaaggctagcctccttagctgtttacagtatcttatcttttagatgcctcccagacaaaaatctgagatggaaaagctacatcaagttcatgctattccaggcccaagaatatctcctaggttagcatattcttatttcaaaaaattagccctggttttctcagttttccatagggaatcccgaccatctgatatatttactgtgtcagtataagtaagttggggttcccctggaactataattaacatttaaaaaatctaatgctttagaagaagctcacagagtggtgatgaacccaaacaacaaagaaaccatttttaacactaggtatcttcatcagtataggtaggtgttcacaatttttgatggatcaaaaacttgctgtaatacaaatagagagtggaggtactaaaggccttgcttgtggaaactgagagaggatacactgctttatgtattactaaagttaggggagaatgaaggaaatctgacagatgaaaaattctacaggaacctcatcatcgtggaactgaactgatgataacttggaacactccagtaaattctgttgtgtaatgtaatttggagcagtgataatacagacatattttctgttccatcagaaaatcagcaggcaccagtccaaaggtaccacacctgtacatgaagaaggaaagttctaatacaagaaaactgaaaagcaccaagctttaaattcaagattaattacaatccttaactataagtgatgataaaaactaacttgaaatgtgactaaataactgatccaaactgggcattaagtggcaggattatgagaaaggataaaaaaagagatttgagaaaacacatttcttgaattttcagaaaaaaatctagactattgctttgacacttagaaattctgaggtttttcaattggaattgagcatctctgtatgtggggatgtgggcccttatcaagggataaaaatccaaacactctaacatgcctccttgactgtaaagtaatgacactggttccaaaattcacaaataatagacactactgtccccccacccccaccccataggctaagaataattctgtaccagaataaaaggagctggtccagggaactgatatttactgaacatacaaagttagtgctagaaggggcctttgagaatgcttcccgccacctgtttccagctcaagacaggtgcacagcagaagctgggagttgcctatggctgcacagctcactgaaggtagaacaatgattggtgctcagtccaattctgtctcccccatgcctagctgttaagtaattactggttcaaaactacgtgttattagtaaaacaaacaaaacagataaagacagcatttaaaactgtgttgtcagataagagaacacatccaaaatgcatgattcttacaaactaaaggaagttaatgtgcaaaaatctcaaccaaaactactatttttagtatacttgtttacgtaaatgctgattggaaatatttaaatgactatagatctgattctttcttttcctttggaaactgggattaatgtatgctctagatccatttattagaaatgcaaaaatactacaattttttgatggatgaaaatactcctgtaacacaaacagagaactggaggaactgaagaataactcactcatatagctctgcctcattctgtgtgtgtgtgcatgtgtgtgttagcagaggtattttactcagaaaataggtttcaaagaacattaatgactttcttttcccttttatgtctgcttaatcagtgttaaactgctatgggaaaagttttatagaactatataacctgaatgttggtctctttgtacacatcttttctatgactgcaaatcttcactttatgtatcatttttactgtcatattatttttgttcaataaaaactttgtgataaaaggtg

SEQ ID NO: 162 - DNA, 2483 bp, Homo sapiens
agcagccgcggcagcccaggaggcggaggcagcggcaacggcagagacagcaacgtgcccgccgcagtcagcccggcctcgtcggacccgcaccggcccgcccgcccgcccgcaccgcgtcggggcgccctctccactgcgcgcggtacaaggaaatggtagaactagtgatctcacccagcctcactgtaaacagcgattgtctggataaactgaagtttaaccgtgctgacgctgctgtgtggactctgagtgacagacaaggcatcaccaaatcggcccccctgagagtgtcccagctcttctccagatcttgcccacgtgtcctcccccgccagccttccacagccatggcagcctacggccagacgcagtacagtgcggggatccagcaggctaccccctatacagcttacccacctccagcacaagcctatggaatcccttcctacagcatcaagacagaagacagcttgaaccattcccctggccagagtggattcctcagctatggctccagcttcagcacctcacccactggacagagcccatacacctaccagatgcacggcacaacagggttctatcaaggaggaaatggactgggcaacgcagccggtttcgggagtgtgcaccaggactatccttcctaccccggcttcccccagagccagtacccccagtattacggctcatcctacaaccctccctacgtcccggccagcagcatctgcccttcgcccctctccacgtccacctacgtcctccaggaggcatctcacaacgtccccaaccagagttccgagtcacttgctggtgaatacaacacacacaatggaccttccacaccagcgaaagagggagacacagacaggccgcaccgggcctccgacgggaagctccgaggccggtctaagaggagcagtgacccgtccccggcaggggacaatgagattgagcgtgtgttcgtgtgggacttggatgagacaataattatttttcactccttactcacggggacatttgcatccagatacgggaaggacaccacgacgtccgtgcgcattggccttatgatggaagagatgatcttcaaccttgcagatacacatctgttcttcaatgacctggaggattgtgaccagatccacgttgatgacgtctcatcagatgacaatggccaagatttaagcacatacaacttctccgctgacggcttccacagttcggccccaggagccaacctgtgcctgggctctggcgtgcacggcggcgtggactggatgaggaagctggccttccgctaccggcgggtgaaggagatgtacaatacctacaagaacaacgttggtgggttgataggcactcccaaaagggagacctggctacagctccgagctgagctggaagctctcacagacctctggctgacccactccctgaaggcactaaacctcatcaactcccggcccaactgtgtcaatgtgctggtcaccaccactcaactaattcctgccctggccaaagtcctgctatatggcctggggtctgtgtttcctattgagaacatctacagtgcaaccaagacagggaaggagagctgcttcgagaggataatgcagagattcggcagaaaagctgtctacgtggtgatcggtgatggtgtggaagaggagcaaggagcgaaaaagcacaacatgcctttctggcggatatcctgccacgcagacctggaggcactgaggcacgccctggagctggagtatttatagcaggatcagcagcatctccacctgccatctcaccctcagaccccctcgccttccccacctccccaccgagaactccagagacccagatgttggacaccaggaaggggccccacagccgagacgacgtgtccagtgaccatctcagaagccgtccatcagtccaaatgggggttctgagaaggaaagtacccaacattggcttcggagtatttgactttggggaaaagggctggctcggagtctagactcttctgtaagactcacagaacaaaagcaaggaattgctgatttggggggtgcctggtgatgaggaggggatgggtttgtcttgtcttctttttaatttatggactagtctcattactccggaattatgctcttgtacctgtgtggctgggtttcttagtcgttggtttggtttggttttttgaactggtatgtggggtggttcacagttctaatgtaagcactctattctccaagttgtgctttgtggggacaatcattctttgaacattagagaggaaggcagttcaagctgttgaaaagactattgcttatttttgtttttaaagacctacttgacgtcatgtggacagtgcacgtgccttacgctacatcttgttttctaggaagagggggatgctgggaaggaatgggtgctttgtgatggataaaaggcattaaataaaaccacgtttacattttgaa

SEQ ID NO: 163 - DNA, 2104 bp, Homo sapiens
aaccgcatctgcagcgagcatctgagaagccaagactgagccggcggccgcggcgcagcgaacgagcagtgaccgtgctcctacccagctctgctccacagcgcccacctgtctccgcccctcggcccctcgcccggctttgcctaaccgccacgatgatgttctcgggcttcaacgcagactacgaggcgtcatcctcccgctgcagcagcgcgtccccggccggggatagcctctcttactaccactcacccgcagactccttctccagcatgggctcgcctgtcaacgcgcaggacttctgcacggacctggccgtctccagtgccaacttcattcccacggtcactgccatctcgaccagtccggacctgcagtggctggtgcagcccgccctcgtctcctccgtggccccatcgcagaccagagcccctcaccctttcggagtccccgccccctccgctggggcttactccagggctggcgttgtgaagaccatgacaggaggccgagcgcagagcattggcaggaggggcaaggtggaacagttatctccagaagaagaagagaaaaggagaatccgaagggaaaggaataagatggctgcagccaaatgccgcaaccggaggagggagctgactgatacactccaagcggagacagaccaactagaagatgagaagtctgctttgcagaccgagattgccaacctgctgaaggagaaggaaaaactagagttcatcctggcagctcaccgacctgcctgcaagatccctgatgacctgggcttcccagaagagatgtctgtggcttcccttgatctgactgggggcctgccagaggttgccaccccggagtctgaggaggccttcaccctgcctctcctcaatgaccctgagcccaagccctcagtggaacctgtcaagagcatcagcagcatggagctgaagaccgagccctttgatgacttcctgttcccagcatcatccaggcccagtggctctgagacagcccgctccgtgccagacatggacctatctgggtccttctatgcagcagactgggagcctctgcacagtggctccctggggatggggcccatggccacagagctggagcccctgtgcactccggtggtcacctgtactcccagctgcactgcttacacgtcttccttcgtcttcacctaccccgaggctgactccttccccagctgtgcagctgcccaccgcaagggcagcagcagcaatgagccttcctctgactcgctcagctcacccacgctgctggccctgtgagggggcagggaaggggaggcagccggcacccacaagtgccactgcccgagctggtgcattacagagaggagaaacacatcttccctagagggttcctgtagacctagggaggaccttatctgtgcgtgaaacacaccaggctgtgggcctcaaggacttgaaagcatccatgtgtggactcaagtccttacctcttccggagatgtagcaaaacgcatggagtgtgtattgttcccagtgacacttcagagagctggtagttagtagcatgttgagccaggcctgggtctgtgtctcttttctctttctccttagtcttctcatagcattaactaatctattgggttcattattggaattaacctggtgctggatattttcaaattgtatctagtgcagctgattttaacaataactactgtgttcctggcaatagtgtgttctgattagaaatgaccaatattatactaagaaaagatacgactttattttctggtagatagaaataaatagctatatccatgtactgtagtttttcttcaacatcaatgttcattgtaatgttactgatcatgcattgttgaggtggtctgaatgttctgacattaacagttttccatgaaaacgttttattgtgtttttaatttatttattaagatggattctcagatatttatatttttattttatttttttctaccttgaggtcttttgacatgtggaaagtgaatttgaatgaaaaatttaagcattgtttgcttattgttccaagacattgtcaataaaagcatttaagttgaatgcga

SEQ ID NO: 164 - DNA, 2300 bp, Homo sapiens
accattttttcctgcatggcatggacagaagcaggggctaaagctctgttcctctctcctggaagcttgcagacctcccttcagaaccaatcccaagaagccacctatccggaacaacacaagacggagtttttgctcttaccgcccagggtggagtgcaatggcgcaatcttgactcactgcaacctctgcttcccggttcaagcgattctcctgcctcagcctaccaagtagctgggattacaggatgctgccggactggaagagctccttgatcctcatggcttacatcatcatcttcctcactggcctccctgccaacctcctggccctgcgggcctttgtggggcggatccgccagccccagcctgcacctgtgcacatcctcctgctgagcctgacgctggccgacctcctcctgctgctgctgctgcccttcaagatcatcgaggctgcgtcgaacttccgctggtacctgcccaaggtcgtctgcgccctcacgagttttggcttctacagcagcatctactgcagcacgtggctcctggcgggcatcagcatcgagcgctacctgggagtggctttccccgtgcagtacaagctctcccgccggcctctgtatggagtgattgcagctctggtggcctgggttatgtcctttggtcactgcaccatcgtgatcatcgttcaatacttgaacacgactgagcaggtcagaagtggcaatgaaattacctgctacgagaacttcaccgataaccagttggacgtggtgctgcccgtgcggctggagctgtgcctggtgctcttcttcatccccatggcagtcaccatcttctgctactggcgttttgtgtggatcatgctctcccagccccttgtgggggcccagaggcggcgccgagccgtggggctggctgtggtgacgctgctcaatttcctggtgtgcttcggaccttacaacgtgtcccacctggtggggtatcaccagagaaaaagcccctggtggcggtcaatagccgtggtgttcagttcactcaacgccagtctggaccccctgctcttctatttctcttcttcagtggtgcgcagggcatttgggagagggctgcaggtgctgcggaatcagggctcctccctgttgggacgcagaggcaaagacacagcagaggggacaaatgaggacaggggtgtgggtcaaggagaagggatgccaagttcggacttcactacagagtagcagtttccctggaccttcagaggtcgcctgggttacacaggagctgggaagcctgggagaggcggagcaggaaggctcccatccagattcagaaatccttagacccagcccaggactgcgactttgaaaaaaatgcctttcaccagcttggtatcccttcctgactgaattgtcctactcaaaggagcataagtcagagatgcacgaagaagtagttaggtatagaagcacctgccgggtgtggtggctcatgcctataatcccagaactttgggaggctgaggcaggtggatcacttgaggtcgggagattgagaacatcctggtcaacatgggaaaaccccgtctctactaaaaatacaaaaaaattagctgggcatggtggcacatgcctataatcccagctactctggaggctgaggcaggagaatccttgaacccgggagttggaggttgcagtgagctgagatcacgccactgcactccagcctagcgacagagcaagactccatttaaaaaaaaaaaaaaaaaaaaaaagaagcaccttcaggctggagaagcagcgtagctaacacaagtccagtccttgtgatgtggctggtagttggggatggccaggctgaagcagagagtcctagagaaatctcgatacaagcttcaaagcaacacctagacactgctctagcggttgatcctggagataaaccaacaagagagagatggaagagaaatactaaatgaggtcaaagaagactcagaaaggttctgagcctggagatgagcagggaggcctcagggcttagacctttaatgataggggtttccctgcattggtttgacctgttgcctttttgatgtgctctgtttgttttcatgtgttgtcttgtctcccctgctaaactgggagctgccaggggtctgggtcttatctccttcctccatggtaccccacacaggccaggatgtggtttggtacccagcaatcagagattggcactccctcatacaggggaaagcaacctggtctagcaaattgaaaataaagatgataaaactctgaa

SEQ ID NO: 165 - DNA, 2204 bp, Homo sapiens
agacgcggagctgggaaaagggaggcagaggaggcggaggcagaggcagaggcagaggcagagcccgagcccggtgccgagaccaagcgacagaccggcggggctgggcctcgcaaagccggctcggcgagctctcccgacacccgagccggggaggaaaagcagcgactcctcgctcgcatccccgggagccgcactccagactggcccggtagtcaggggctcaggagcagatcccgaggcaggctttgctcagcctccgacgagggctggccctttggaaggcgccttcaacagccggaccagacaggccaccatgaccgagaattccacgtccgcccctgcggccaagcccaagcgggccaaggcctccaagaagtccacagaccaccccaagtattcagacatgatcgtggctgccatccaggccgagaagaaccgcgctggctcctcgcgccagtccattcagaagtatatcaagagccactacaaggtgggtgagaacgctgactcgcagatcaagttgtccatcaagcgcctggtcaccaccggtgtcctcaagcagaccaaaggggtgggggcctcggggtccttccggctagccaagagcgacgaacccaagaagtcagtggccttcaagaagaccaagaaggaaatcaagaaggtagccacgccaaagaaggcatccaagcccaagaaggctgcctccaaagccccaaccaagaaacccaaagccaccccggtcaagaaggccaagaagaagctggctgccacgcccaagaaagccaaaaaacccaagactgtcaaagccaagccggtcaaggcatccaagcccaaaaaggccaaaccagtgaaacccaaagcaaagtccagtgccaagagggccggcaagaagaagtgacaatgaagtcttttcttgcggacactccctcctgtctcctattttctgtaaataattttctccttttttctctcttgatgctcaccaccaccttttgcccccttctgttctgactttataagagacaggatttggattcttcagaaattacagaataattcatttttccttaaccagttgtgcaaggacagcaacaaccaatctaatgatgagaatgtacttatattttgttttgctattaacctacttacggggttagggatttgcggggggggcttgtgtgttttgttggcttgtttgccatgaaggtagatgtgggtggggagaagacacaaggcagtttgttctggctagatgagagggaacccaggaattgtgaggttagcaggaatatctttagggtgagtgagttttctttgagttgggcacccgttgtgagagtttcagaacctttggccagcaggagagaggtggtagggagcagccagccggcaaaggaaggagggggaaaaaaaccgccaccgggctgacttccacctcccagtggtgagcagtgggggcccaaacccagtttccttctcatttttgttagtttgcgctttcggcctccctattttcttagggaaggggagtggggtccaagtgacagctggatgggagaagccatagtttctcccagtcagctaggatgtagccattgggggatctttgtggcttcagcaaattctcttgttaaaccggagtgaaaacttcaggggaagggtggggagtcagccaagtgcctcagtgtgccctgttgaaacttaggtttttccacgcaatcgatggattgtgtcctaggaagacttttcttttcctctggatttttgttcctcctgtacaagaggtgtctttgcttggtttggtggggctgcggccacttaaaacctcccgatctctttttgagtcctttattataagtagttgtagctgcgggagggggagggggagtgggcgggcagtggatagtaagacttactgcagtcgatttgggatttgctaagtagttttacagagctagatctgtgtgcatgtgtgtgtttgtgtatatatacatatctagggctagtacttagtttcacacccgggagctgggagaaaaaacctgtacagttgtctttctcttatttttaataaaatagaaaaatcgcgcacttgcgcgtcccccccccacccccttttttaaacaagtgttacttgtgccgggaaaattttgctgtctttgtaattttaaaactttaaaataaattggaaaagggagaaa

SEQ ID NO: 166 - DNA, 2517 bp, Homo sapiens
aaacggccagcctgaggagctgctgcgagggtccgcttcgtctttcgagagtgactcccgcggtcccaaggctttccagagcgaacctgtgcggctgcaggcaccggcgtgttgagtttccggcgttccgaaggactgagctcttgtcgcggatcccgtccgccgtttccagcccccagtctcagagcggagcccacagagcagggcaccggcatggccaaagccgcggcgatcggcatcgacctgggcaccacctactcctgcgtgggggtgttccaacacggcaaggtggagatcatcgccaacgaccagggcaaccgcaccacccccagctacgtggccttcacggacaccgagcggctcatcggggatgcggccaagaaccaggtggcgctgaacccgcagaacaccgtgtttgacgcgaagcggctgattggccgcaagttcggcgacccggtggtgcagtcggacatgaagcactggcctttccaggtgatcaacgacggagacaagcccaaggtgcaggtgagctacaagggggagaccaaggcattctaccccgaggagatctcgtccatggtgctgaccaagatgaaggagatcgccgaggcgtacctgggctacccggtgaccaacgcggtgatcaccgtgccggcctacttcaacgactcgcagcgccaggccaccaaggatgcgggtgtgatcgcggggctcaacgtgctgcggatcatcaacgagcccacggccgccgccatcgcctacggcctggacagaacgggcaagggggagcgcaacgtgctcatctttgacctgggcgggggcaccttcgacgtgtccatcctgacgatcgacgacggcatcttcgaggtgaaggccacggccggggacacccacctgggtggggaggactttgacaacaggctggtgaaccacttcgtggaggagttcaagagaaaacacaagaaggacatcagccagaacaagcgagccgtgaggcggctgcgcaccgcctgcgagagggccaagaggaccctgtcgtccagcacccaggccagcctggagatcgactccctgtttgagggcatcgacttctacacgtccatcaccagggcgaggttcgaggagctgtgctccgacctgttccgaagcaccctggagcccgtggagaaggctctgcgcgacgccaagctggacaaggcccagattcacgacctggtcctggtcgggggctccacccgcatccccaaggtgcagaagctgctgcaggacttcttcaacgggcgcgacctgaacaagagcatcaaccccgacgaggctgtggcctacggggcggcggtgcaggcggccatcctgatgggggacaagtccgagaacgtgcaggacctgctgctgctggacgtggctcccctgtcgctggggctggagacggccggaggcgtgatgactgccctgatcaagcgcaactccaccatccccaccaagcagacgcagatcttcaccacctactccgacaaccaacccggggtgctgatccaggtgtacgagggcgagagggccatgacgaaagacaacaatctgttggggcgcttcgagctgagcggcatccctccggcccccaggggcgtgccccagatcgaggtgaccttcgacatcgatgccaacggcatcctgaacgtcacggccacggacaagagcaccggcaaggccaacaagatcaccatcaccaacgacaagggccgcctgagcaaggaggagatcgagcgcatggtgcaggaggcggagaagtacaaagcggaggacgaggtgcagcgcgagagggtgtcagccaagaacgccctggagtcctacgccttcaacatgaagagcgccgtggaggatgaggggctcaagggcaagatcagcgaggcggacaagaagaaggttctggacaagtgtcaagaggtcatctcgtggctggacgccaacaccttggccgagaaggacgagtttgagcacaagaggaaggagctggagcaggtgtgtaaccccatcatcagcggactgtaccagggtgccggtggtcccgggcctggcggcttcggggctcagggtcccaagggagggtctgggtcaggccctaccattgaggaggtggattaggggcctttgttctttagtatgtttgtctttgaggtggactgttgggactcaaggactttgctgctgttttcctatgtcatttctgcttcagctctttgctgcttcacttctttgtaaagttgtaacctgatggtaattagctggcttcattatttttgtagtacaaccgatatgttcattagaattctttgcatttaatgttgatactgtaagggtgtttcgttccctttaaatgaatcaacactgccaccttctgtacgagtttgtttgttttttttttttttttttttttttgcttggcgaaaacactacaaaggctgggaatgtatgtttttataatttgtttatttaaatatgaaaaataaaatgttaaacttt

SEQ ID NO: 167 - DNA, 3921 bp, Homo sapiens
gacgccggccaagacagcacagacagattgacctattggggtgtttcgcgagtgtgagagggaagcgccgcggcctgtatttctagacctgcccttcgcctggttcgtggcgccttgtgaccccgggcccctgccgcctgcaagtcggaaattgcgctgtgctcctgtgctacggcctgtggctggactgcctgctgctgcccaactggctggcaagatgaagctctccctggtggccgcgatgctgctgctgctcagcgcggcgcgggccgaggaggaggacaagaaggaggacgtgggcacggtggtcggcatcgacctggggaccacctactcctgcgtcggcgtgttcaagaacggccgcgtggagatcatcgccaacgatcagggcaaccgcatcacgccgtcctatgtcgccttcactcctgaaggggaacgtctgattggcgatgccgccaagaaccagctcacctccaaccccgagaacacggtctttgacgccaagcggctcatcggccgcacgtggaatgacccgtctgtgcagcaggacatcaagttcttgccgttcaaggtggttgaaaagaaaactaaaccatacattcaagttgatattggaggtgggcaaacaaagacatttgctcctgaagaaatttctgccatggttctcactaaaatgaaagaaaccgctgaggcttatttgggaaagaaggttacccatgcagttgttactgtaccagcctattttaatgatgcccaacgccaagcaaccaaagacgctggaactattgctggcctaaatgttatgaggatcatcaacgagcctacggcagctgctattgcttatggcctggataagagggagggggagaagaacatcctggtgtttgacctgggtggcggaaccttcgatgtgtctcttctcaccattgacaatggtgtcttcgaagttgtggccactaatggagatactcatctgggtggagaagactttgaccagcgtgtcatggaacacttcatcaaactgtacaaaaagaagacgggcaaagatgtcaggaaagacaatagagctgtgcagaaactccggcgcgaggtagaaaaggccaaacgggccctgtcttctcagcatcaagcaagaattgaaattgagtccttctatgaaggagaagacttttctgagaccctgactcgggccaaatttgaagagctcaacatggatctgttccggtctactatgaagcccgtccagaaagtgttggaagattctgatttgaagaagtctgatattgatgaaattgttcttgttggtggctcgactcgaattccaaagattcagcaactggttaaagagttcttcaatggcaaggaaccatcccgtggcataaacccagatgaagctgtagcgtatggtgctgctgtccaggctggtgtgctctctggtgatcaagatacaggtgacctggtactgcttgatgtatgtccccttacacttggtattgaaactgtgggaggtgtcatgaccaaactgattccaaggaacacagtggtgcctaccaagaagtctcagatcttttctacagcttctgataatcaaccaactgttacaatcaaggtctatgaaggtgaaagacccctgacaaaagacaatcatcttctgggtacatttgatctgactggaattcctcctgctcctcgtggggtcccacagattgaagtcacctttgagatagatgtgaatggtattcttcgagtgacagctgaagacaagggtacagggaacaaaaataagatcacaatcaccaatgaccagaatcgcctgacacctgaagaaatcgaaaggatggttaatgatgctgagaagtttgctgaggaagacaaaaagctcaaggagcgcattgatactagaaatgagttggaaagctatgcctattctctaaagaatcagattggagataaagaaaagctgggaggtaaactttcctctgaagataaggagaccatggaaaaagctgtagaagaaaagattgaatggctggaaagccaccaagatgctgacattgaagacttcaaagctaagaagaaggaactggaagaaattgttcaaccaattatcagcaaactctatggaagtgcaggccctcccccaactggtgaagaggatacagcagaaaaagatgagttgtagacactgatctgctagtgctgtaatattgtaaatactggactcaggaacttttgttaggaaaaaattgaaagaacttaagtctcgaatgtaattggaatcttcacctcagagtggagttgaaactgctatagcctaagcggctgtttactgcttttcattagcagttgctcacatgtctttgggtgggggggagaagaagaattggccatcttaaaaagcgggtaaaaaacctgggttagggtgtgtgttcaccttcaaaatgttctatttaacaactgggtcatgtgcatctggtgtaggaagttttttctaccataagtgacaccaataaatgtttgttatttacactggtctaatgtttgtgagaagcttctaattagatcaattacttattttaggaaatttaagactagatactcgtgtgtggggtgaggggagggagtatttggtatgttgggataaggaaacacttctatttaatgcttccagggatttttttttttttttttaaccctcctgggcccaagtgatccttccacctcagtctcccagctaattgagaccacaggcttgttaccaccatgctcggcttttgcattaatctaagaaaaggggagagaagttaatccacatctttactcaggcaaggggcatttcacagtgcccaagagtggggttttcttgaacatacttggtttcctatttccccttatctttctaaaactgcctttctggtggctttttttaaaattattactaatgatgcttttatagctgcttggattctctgagaaatgatggggagtgagtgatcactggtattaactttatacacttggatttcatttgtaactttaggatgtaaaggtatattgtgaaccctagctgtgtcagaatctccatccctgaaatttctcattagtggtactggggtgggatcttggatggtgacattgaaactacactaaatcccctcactatgaatgggttgttaaaggcaatggtttgtgtcaaaactggtttaggattacttagattgtgttcctgaagaaaagagtccaggtaaatggtatgatcaataaaggacaggctggtgctaacataaaatccaatattgtaatcctagcactttgggaggccaaggcgggtggatcacaaggtcaagagatagagaccatctttgccaacatggtgaaactccatctctactgaaaatacaaaaattagctgggcgtggtagtgcaagctgaaggctgaggcaggagaatcactcgaacccgggaggcagaggttgcagtgagccgagatcacaccactgtactccagcccggcactccagcctggcgacaagagtgagactccacctcaaaaaaaaaaaaaagaatccaatactgcccaaggataggtattttatagatgggcaactggctgaaaggttaattctctagggctagtagaactggatcccaacaccaaactcttaattagacctaggcctcagctgcactgcccgaaaagcatttgggcagaccctgagcagaatactggtctcaggccaagcccaatacagccattaaagatgacctacagtgctgtgtaccctggggcaatagggttaaatggtagttagcaactagggctagtcttcccttacctcaaaggctctcactaccgtggaccacctagtctgtaactctttctgaggagctgttactgaatattaaaaagatagacttcaa

SEQ ID NO: 168 - DNA, 2055 bp, Homo sapiens
aacacacatctctccgcgcggccacggcgcccgcggacccggcgcgcccgcccgcctcccgcgccgcgccctcgccgccgcccgcctcccgccgcggccccggaggcccggcccggcccgagccccgagcgccggcggcccgactcccggccgcccctttctttctcctcgccggcccgagagcaggaacacgataacgaaggaggcccaacttcattcaataaggagcctgacggatttatcccagacggtagaacaaaaggaagaatattgatggattttaaaccagagtttttaaagagcttgagaatacggggaaattaatttgttctcctacacacatagatagggtaaggttgtttctgatgcagctgagaaaaatgcagaccgtcaaaaaggagcaggcgtctcttgatgccagtagcaatgtggacaagatgatggtccttaattctgctttaacggaagtgtcagaagactccacaacaggtgaggagctgcttctcagtgaaggaagtgtggggaagaacaaatcttctgcatgtcggaggaaacgggaattcattcctgatgaaaagaaagatgctatgtattgggaaaaaaggcggaaaaataatgaagctgccaaaagatctcgtgagaagcgtcgactgaatgacctggttttagagaacaaactaattgcactgggagaagaaaacgccactttaaaagctgagctgctttcactaaaattaaagtttggtttaattagctccacagcatatgctcaagagattcagaaactcagtaattctacagctgtgtactttcaagattaccagacttccaaatccaatgtgagttcatttgtggacgagcacgaaccctcgatggtgtcaagtagttgtatttctgtcattaaacactctccacaaagctcgctgtccgatgtttcagaagtgtcctcagtagaacacacgcaggagagctctgtgcagggaagctgcagaagtcctgaaaacaagttccagattatcaagcaagagccgatggaattagagagctacacaagggagccaagagatgaccgaggctcttacacagcgtccatctatcaaaactatatggggaattctttctctgggtactcacactctcccccactactgcaagtcaaccgatcctccagcaactccccgagaacgtcggaaactgatgatggtgtggtaggaaagtcatctgatggagaagacgagcaacaggtccccaagggccccatccattctccagttgaactcaagcatgtgcatgcaactgtggttaaagttccagaagtgaattcctctgccttgccacacaagctccggatcaaagccaaagccatgcagatcaaagtagaagcctttgataatgaatttgaggccacgcaaaaactttcctcacctattgacatgacatctaaaagacatttcgaactcgaaaagcatagtgccccaagtatggtacattcttctcttactcctttctcagtgcaagtgactaacattcaagattggtctctcaaatcggagcactggcatcaaaaagaactgagtggcaaaactcagaatagtttcaaaactggagttgttgaaatgaaagacagtggctacaaagtttctgacccagagaacttgtatttgaagcaggggatagcaaacttatctgcagaggttgtctcactcaagagacttatagccacacaaccaatctctgcttcagactctgggtaaattactactgagtaagagctgggcatttagaaagatgtcatttgcaatagagcagtccattttgtattatgctgaattttcactggacctgtgatgtcatttcactgtgatgtgcacatgttgtctgtttggtgtctttttgtgcacagattatgatgaagattagattgtgttatcactctgcctgtgtatagtcagatagtccatgcgaaggctgtatatattgaacattatttttgttgttctattataaagtgtgtaagttaccagtttcaataaaggattggtgacaaacacagaa

SEQ ID NO: 169 - DNA, 4405 bp, Homo sapiens
aagtcgcgaccagagccattggagggcgcggggactgcaaccctaatcagagcccaaatggcgcagtgggaaatgctgcagaatcttgacagcccctttcaggatcagctgcaccagctttactcgcacagcctcctgcctgtggacattcgacagtacttggctgtctggattgaagaccagaactggcaggaagctgcacttgggagtgatgattccaaggctaccatgctattcttccacttcttggatcagctgaactatgagtgtggccgttgcagccaggacccagagtccttgttgctgcagcacaatttgcggaaattctgccgggacattcagcccttttcccaggatcctacccagttggctgagatgatctttaacctccttctggaagaaaaaagaattttgatccaggctcagagggcccaattggaacaaggagagccagttctcgaaacacctgtggagagccagcaacatgagattgaatcccggatcctggatttaagggctatgatggagaagctggtaaaatccatcagccaactgaaagaccagcaggatgtcttctgcttccgatataagatccaggccaaagggaagacaccctctctggacccccatcagaccaaagagcagaagattctgcaggaaactctcaatgaactggacaaaaggagaaaggaggtgctggatgcctccaaagcactgctaggccgattaactaccctaatcgagctactgctgccaaagttggaggagtggaaggcccagcagcaaaaagcctgcatcagagctcccattgaccacgggttggaacagctggagacatggttcacagctggagcaaagctgttgtttcacctgaggcagctgctgaaggagctgaagggactgagttgcctggttagctatcaggatgaccctctgaccaaaggggtggacctacgcaacgcccaggtcacagagttgctacagcgtctgctccacagagcctttgtggtagaaacccagccctgcatgccccaaactccccatcgacccctcatcctcaagactggcagcaagttcaccgtccgaacaaggctgctggtgagactccaggaaggcaatgagtcactgactgtggaagtctccattgacaggaatcctcctcaattacaaggcttccggaagttcaacattctgacttcaaaccagaaaactttgacccccgagaaggggcagagtcagggtttgatttgggactttggttacctgactctggtggagcaacgttcaggtggttcaggaaagggcagcaataaggggccactaggtgtgacagaggaactgcacatcatcagcttcacggtcaaatatacctaccagggtctgaagcaggagctgaaaacggacaccctccctgtggtgattatttccaacatgaaccagctctcaattgcctgggcttcagttctctggttcaatttgctcagcccaaaccttcagaaccagcagttcttctccaacccccccaaggccccctggagcttgctgggccctgctctcagttggcagttctcctcctatgttggccgaggcctcaactcagaccagctgagcatgctgagaaacaagctgttcgggcagaactgtaggactgaggatccattattgtcctgggctgacttcactaagcgagagagccctcctggcaagttaccattctggacatggctggacaaaattctggagttggtacatgaccacctgaaggatctctggaatgatggacgcatcatgggctttgtgagtcggagccaggagcgccggctgctgaagaagaccatgtctggcacctttctactgcgcttcagtgaatcgtcagaagggggcattacctgctcctgggtggagcaccaggatgatgacaaggtgctcatctactctgtgcaaccgtacacgaaggaggtgctgcagtcactcccgctgactgaaatcatccgccattaccagttgctcactgaggagaatatacctgaaaacccactgcgcttcctctatccccgaatcccccgggatgaagcttttgggtgctactaccaggagaaagttaatctccaggaacggaggaaatacctgaaacacaggctcattgtggtctctaatagacaggtggatgaactgcaacaaccgctggagcttaagccagagccagagctggagtcattagagctggaactagggctggtgccagagccagagctcagcctggacttagagccactgctgaaggcagggctggatctggggccagagctagagtctgtgctggagtccactctggagcctgtgatagagcccacactatgcatggtatcacaaacagtgccagagccagaccaaggacctgtatcacagccagtgccagagccagatttgccctgtgatctgagacatttgaacactgagccaatggaaatcttcagaaactgtgtaaagattgaagaaatcatgccgaatggtgacccactgttggctggccagaacaccgtggatgaggtttacgtctcccgccccagccacttctacactgatggacccttgatgccttctgacttctaggaaccacatttcctctgttcttttcatatctcttgcccttcctactcctcatagcatgatattgttctccaaggatgggaatcaggcatgtgtcccttccaagctgtgttaactgttcaaactcaggcctgtgtgactccattggggtgagaggtgaaagcataacatgggtacagaggggacaacaatgaatcagaacagatgctgagccataggtctaaataggatcctggaggctgcctgctgtgctgggaggtataggggtcctgggggcaggccagggcagttgacaggtacttggagggctcagggcagtggcttctttccagtatggaaggatttcaacattttaatagttggttaggctaaactggtgcatactggcattggcccttggtggggagcacagacacaggataggactccatttctttcttccattccttcatgtctaggataacttgctttcttctttcctttactcctggctcaagccctgaatttcttcttttcctgcaggggttgagagctttctgccttagcctaccatgtgaaactctaccctgaagaaagggatggataggaagtagacctctttttcttaccagtctcctcccctactctgcccctaagctggctgtacctgttcctcccccataaaatgatcctgccaatctaatgtgagtgtgaagctttgcacactagtttatgctacctagtctccactttctcaatgcttaggagacagatcactcctggaggctggggatggtaggattgctggggatttttttttttttaaacagggtctcactctgttgcccaggctagagtgcaatggtgcaatcacagctcactgcagcctcaacctcctgggttcaagcaatcctcctacctcagcctcctgggtagctagcaccatggcatgcgccaccatgccctattttttttttttaaagacagggtcttgctatattgcccaggctggtcttgaactgggctcaagtgatcctcacgccttggcctcccaaagtgctgggattataggcatgagccactgtgcttggccaggatttttttttttttttttttgagatggagtttctctcttgttgtccaggctggagtgcaatggtgtgatctcggctcactgcaacctccgccttccgggttcaagtgactctcctgcctcagcctccccagtagctgggattacagatctgcaccaccatgcccagctaattttgtatttttagtagagacggggtttctccatgttggtcaggctggtctcgaactcctgacctcaagtgatctgtccacctcggcctcccagagtgctgggattacaggcgtgagccactgttcccagcaggaatttcttttttatagtattggataaagtttggtgtttttacagaggagaagcaatgggtcttagctctttctctattatgttatcatcctcccttttttgtacaatatgttgtttacctgaaaggaaggtttctattcgttggttgtggacctggacaaagtccaagtctgtggaacttaaaaccttgaaggtctgtcataggactctggacaatctcacaccttagctattcccagggaaccccagggggcaactgacattgctccaagatgttctcctgatgtagcttgagatataaaggaaaggccctgcacaggtggctgtttcttgtctgttatgtcagaggaacagtcctgttcagaaaggggctcttctgagcagaaatggctaataaactttgtgctgatctggaaa

SEQ ID NO: 170 - DNA, 4694 bp, Homo sapiens
actctcccgagctgcgctaggcgggcgccacggctgcccggcgaaggaaaccgaaaccgagtccgggcccgtccctccgcggccccatccgcccggtgcacccggggccgcgctcgccaggccgcggagcccagagctgcgcgcacgaaccgtgcgccgggagggcgtgggcgtggcgccgaagggtcccgggtcttcgacgcctctgcggcggctcctccctccttgcagttggatccctggcgggtgcggcccggcccggcccgtgagcggcgcacagaatgggccgatgctgcttctacacggcggggacgttgtccctgctcctgctggtgaccagcgtcacgctgctggtggcccgggtcttccagaaggctgtagaccagagtatcgagaagaaaattgtgttaaggaatggtactgaggcatttgactcctgggagaagccccctctgcctgtgtatactcagttctatttcttcaatgtcaccaatccagaggagatcctcagaggggagacccctcgggtggaagaagtggggccatacacctacagggaactcagaaacaaagcaaatattcaatttggagataatggaacaacaatatctgctgttagcaacaaggcctatgtttttgaacgagaccaatctgttggagaccctaaaattgacttaattagaacattaaatattcctgtattgactgtcatagagtggtcccaggtgcacttcctcagggagatcatcgaggccatgttgaaagcctatcagcagaagctctttgtgactcacacagttgacgaattgctctggggctacaaagatgaaatcttgtcccttatccatgttttcaggcccgatatctctccctattttggcctattctatgagaaaaatgggactaatgatggagactatgtttttctaactggagaagacagttaccttaactttacaaaaattgtggaatggaatgggaaaacgtcacttgactggtggataacagacaagtgcaatatgattaatggaacagatggagattcttttcacccactaataaccaaagatgaggtcctttatgtcttcccatctgacttttgcaggtcagtgtatattactttcagtgactatgagagtgtacagggactgcctgcctttcggtataaagttcctgcagaaatattagccaatacgtcagacaatgccggcttctgtatacctgagggaaactgcctgggctcaggagttctgaatgtcagcatctgcaagaatggtgcacccatcattatgtctttcccacacttttaccaagcagatgagaggtttgtttctgccatagaaggcatgcacccaaatcaggaagaccatgagacatttgtggacattaatcctttgactggaataatcctaaaagcagccaagaggttccaaatcaacatttatgtcaaaaaattagatgactttgttgaaacgggagacattagaaccatggttttcccagtgatgtacctcaatgagagtgttcacattgataaagagacggcgagtcgactgaagtctatgattaacactactttgatcatcaccaacataccctacatcatcatggcgctgggtgtgttctttggtttggtttttacctggcttgcatgcaaaggacagggatccatggatgagggaacagcggatgaaagagcacccctcattcgaacctaaacattgcctttgcttggtgaagaaactgtgtgagctgtcctgacctggacgatgacgtggggaaaccctccacctccttgcaggcttgttgcctgttgaaagaaggaaaaagacacggcgctggcaagtgataggaacattctggccagaggttaaagagcaggctgacatggctggccattaagctttataaaatcatgtgggctctgaaattgttcttttatgtgtctagcaagtatttaataaacccttgtatagtaattttgttgttgttgggtgctggtagctccagaattttgtgaccactattgtgggtaaaatgtctctgcatcacttgttaatgctactggtctaacttcattcagtatgcttcattcaccgaactttgtgctcaaaatgcgtatataccattttatgttgtattcctccatttcacttgcaaaacagaagtaaataagagttcgggacccagggtaaaatggtagcttcatccaatatatcattcaaatgcatctgatttctaaaacatattacattttatgctgatcttcagttcataattcttccaggaaaactcagtcttccaactgcaataaaatactgggtagaatcaaatgggaaaggggttgggtggggcaatacccatgagttgatagtgataagctcctaaggatttttaacttgtacttttgtgaacgaagagaatgcataaataatgttggtgaggataaagtacagatatttcatgtagaattaattgctagttatgatgcttgtggatagttaactgttttttttttagtcaaaatgatcatgctacgaaaagatgcttctgagagaatgtaatgagtaactgatttttcttcctgagtcgcccttgccaaatatgttactgtattaattaatctaatattgagtgattatttgtaaaattatgaatatgggaaatccatctatctacagcctaagttacacataagtttcagaaagtctgattagactaaagagatatttcttctgggacagccgccttcttggtaattttgaagttctttttacaagttccttcctcagtttcagttctttccagtgttttgtagctcactgtcactcactgaatagagaaacgtgtgccctatacttcctgtgacaatcattttgctgacagaatgatggatgtttaaaatattgcacaaagtactttaaagaaaggtctgttaggaccagaagcagagacaccacttttcaaaggacttcttggtttcagcataacctaagacagggaattgggagccatcatatgtcacagtgttcagaattcaagcatatttaagggcattttctttgattctcaaagttcagcattcattttgaattgagaagcctatacatttagctgacaaagtgcttatagaatttcttaacaactgaaccattcaaaaggattttttttgtttaaaactggatttcaatgtaagcaaatgaagaaaaaaatatagatttcatttccatagcttcttatccctgtattgaggtaataaattgttttactgacaatttttcctttttctacactaaaacaatatgtgatatatttcccctcttgaagaggcaattcattaaactctcaaattttctatagaatcaagatagaacctttagatactccaactcaccaaaatgtaaaaaaactaacaaaaatatttggtcttcaataatgctaaatatctacatttttagaatttatcaacatttaactagataattgggcatgtcttaattatgcatgtacttatccatactaataaaattgacaatgctagtgcatacttattggtttagtcctattatcaggatataatcatctgtgaggaggatattttaaatactgtaaatgataacagttaatgatatacacatttagactgagttgcacactggcagggagaccaaaaacattacttccatacttgtgtcatgattcttttttttttgagagagtctcactctgtcgccaggctggagtacagtggcatgatctcggctcactgcaacctctgcctcccgggttcaagcaattctcctgcctcagccacccaagtagctgggactacaggtgcgtgccaccacgcccagctaaattttgtatttttagtggagacggggtttcaccatgttggccaggatggtctcaatctcctgaccctgcgatctgcccacctcagcctcccaaagtgctgggattacaggcgtaagccaccgggcctggcctgttttatgattcttaatagttacttggtttaaatcacatttgatactatccttctgaaaagtctgagacagatctacaaactacagtcaaaattatagattaagaggaatgaatgcacctatttggctttaagttgaagatgaattatttctcatgctcattttcttgcggcagttatcttagaaagacccccaaaggctttgtgattgtaagcactgtcatgatcacagaatgcaagcttctggtaccatgatcctcaacttagagaggaagaaaccaagacagagagcttaactcacttctctcagggaaaattaggagttgagcacaggacaggaaatgggctttgccacttttagctccaggcttttctaaccagacttgatttcctcatgttctagaaagatcactaatggtcaagtggaacaagcactacacgactaacccctattggggtttttaacttaagggaggctaatttttaatttaaactgctcgagatatgagttctgcaaaaggtggtccgcatccttggccctctggacattatcactaaattgcttgtgcctgttaacaagaatactgaccagaatgctcttcatgtagcttatacagttggttcacttcatgcggttcttgacatgtttatttctacccttaatgcaatgaaatgtttcattaataaaaaaccactttatataaaa

SEQ ID NO: 171 - DNA, 2543 bp, Homo sapiens
atcatttttcttctccggccccatggaggaagtgagaaagttggcacagtcacgccgggcttcgcaggaccaggtcactcagtgacagatggacaatgcaagaatgaactccttcctggaataccccatacttagcagtggcgactcggggacctgctcagcccgagcctacccctcggaccataggattacaactttccagtcgtgcgcggtcagcgccaacagttgcggcggcgacgaccgcttcctagtgggcaggggggtgcagatcggttcgccccaccaccaccaccaccaccaccatcgccacccccagccggctacctaccagacttccgggaacctgggggtgtcctactcccactcaagttgtggtccaagctatggctcacagaacttcagtgcgccttacagcccctacgcgttaaatcaggaagcagacgtaagtggtgggtacccccagtgcgctcccgctgtttactctggaaatctctcatctcccatggtccagcatcaccaccaccaccagggttatgctgggggcgcggtgggctcgcctcaatacattcaccactcatatggacaggagcaccagagcctggccctggctacgtataataactccttgtcccctctccacgccagccaccaagaagcctgtcgctcccccgcatcggagacatcttctccagcgcagacttttgactggatgaaagtcaaaagaaaccctcccaaaacagggaaagttggagagtacggctacctgggtcaacccaacgcggtgcgcaccaacttcactaccaagcagctcacggaactggagaaggagttccacttcaacaagtacctgacgcgcgcccgcagggtggagatcgctgcatccctgcagctcaacgagacccaagtgaagatctggttccagaaccgccgaatgaagcaaaagaaacgtgagaaggagggtctcttgcccatctctccggccaccccgccaggaaacgacgagaaggccgaggaatcctcagagaagtccagctcttcgccctgcgttccttccccggggtcttctacctcagacactctgactacctcccactgaggcggctccagccccagacaacagcccaggcatctccttgggctgggacttcttacccaaagcacatgcttagcttatctttctttccatttacagtctctttcttcctttctaatcctatctggggagctcctggccaggataatatatttgcagataattctggaccagagacttggtgcggggttaacaccttcatccagattgggtgccagcatacattttctggtgggccttaacatccctcctgcttttaggagaattcacagaacctactgttcctttcagatgaccttttggaaaatagttccctttgccaacagaaacatgccagaaggaatcttctcatcttttatctaactatatgtacagctctcccctcccttgtccttgaaagtaggatatagcgaaaggcgagtccaggagctcaggaagaagagatgcactatatgtttacacaattaattcatcccttaatttaagtcattttcatgtgtgtgagtttgctggttgtaaatactttgtcctaagagatttatctttatacagattttctagaaatgtttaggttactaaaacagggtgggcaaactctctaaactggtacaattttataggtgaaagaaaaaattccctcatttaaacccaatcagatgcctcagagggtagccttgatttgttcttacagttaagaagccctgcagagcacaaacttcagaaacccggcttcctgtgctaagtctttcccaatctctacccctttcttctcgggccaccctctgtttaaaatttgtgctgggttattcagaacctaaaagtattattcaaaccaatttcttccttccacagttatcttagctggatataatgtattttcagctcaattgttaatgtgatggatggcacaatgaatgtatattttgtgttattcgtgaatagtcttttgcatgtcgcacaatgtttgatgtccccaaagtaccacactgagttctatcagttatcctttgtgagcctatgatattccccatttcctgtacaatcatgaacagctctgagatcctggagtgatatgatccagagcagagtttacgggtcttaggatgtctgtaataaataaatatactcaagtttcaggtatgcttaagcatccgtgtatttggctgggctacaatttgttaattcctatgaagttggcacatttcatgaggggaaagggagaagggtggtaaatattttcaaagagatgggccttttcttgaataaaagttaataacagctcctttattataatcaaagctcataatggaaaaaaagactgatgaagaaatttatgaagcagatttatttttgaaacaaacatggatacttcctgggtcaagtgctaaccttttcacctccaactggatgttgacgtatatataaacagaactcccttcaaaagccaaaa

SEQ ID NO: 172 - DNA, 2715 bp, Homo sapiens
attttctctggggcaatagcagaataggagcaagccagcactagtcagctaactaagtgactcaaccaaggccttttttccttgttatctttgcagatacttcattttcttagcgtttctggagattacaacatcctgcggttccgtttctgggaactttactgatttatctcccccctcacacaaataagcattgattcctgcatttctgaagatctcaagatctggactactgttgaaaaaatttccagtgaggctcacttatgtctgtaaagatgggaaaaaaatacaagaacattgttctactaaaaggattagaggtcatcaatgattatcattttagaatggttaagtccttactgagcaacgatttaaaacttaatttaaaaatgagagaagagtatgacaaaattcagattgctgacttgatggaagaaaagttccgaggtgatgctggtttgggcaaactaataaaaattttcgaagatataccaacgcttgaagacctggctgaaactcttaaaaaagaaaagttaaaagtaaaaggaccagccctatcaagaaagaggaagaaggaagtggatgctacttcacctgcaccctccacaagcagcactgtcaaaactgaaggagcagaggcaactcctggagctcagaaaagaaaaaaatcaaccaaagaaaaggctggacccaaagggagtaaggtgtccgaggaacagactcagcctccctctcctgcaggagccggcatgtccacagccatgggccgttccccatctcccaagacctcattgtcagctccacccaacagttcttcaactgagaacccgaaaacagtggccaaatgtcaggtaactcccagaagaaatgttctccaaaaacgcccagtgatagtgaaggtactgagtacaacaaagccatttgaatatgagaccccagaaatggagaaaaaaataatgtttcatgctacagtggctacacagacacagttcttccatgtgaaggttttaaacaccagcttgaaggagaaattcaatggaaagaaaatcatcatcatatcagattatttggaatatgatagtctcctagaggtcaatgaagaatctactgtatctgaagctggtcctaaccaaacgtttgaggttccaaataaaatcatcaacagagcaaaggaaactctgaagattgatattcttcacaaacaagcttcaggaaatattgtatatggggtatttatgctacataagaaaacagtaaatcagaagaccacaatctacgaaattcaggatgatagaggaaaaatggatgtagtggggacaggacaatgtcacaatatcccctgtgaagaaggagataagctccaacttttctgctttcgacttagaaaaaagaaccagatgtcaaaactgatttcagaaatgcatagttttatccagataaagaaaaaaacaaacccgagaaacaatgaccccaagagcatgaagctaccccaggaacagcgtcagcttccatatccttcagaggccagcacaaccttccctgagagccatcttcggactcctcagatgccaccaacaactccatccagcagtttcttcaccaagaaaagtgaagacacaatctccaaaatgaatgacttcatgaggatgcagatactgaaggaagggagtcattttccaggaccgttcatgaccagcataggcccagctgagagccatccccacactcctcagatgcctccatcaacaccaagcagcagtttcttaaccacgttgaaaccaagactgaagactgaacctgaagaagtttccatagaagacagtgcccagagtgacctcaaagaagtgatggtgctgaacgcaacagaatcatttgtatatgagcccaaagagcagaagaaaatgtttcatgccacagtggcaactgagaatgaagtcttccgagtgaaggtttttaatattgacctaaaggagaagttcaccccaaagaagatcattgccatagcaaattatgtttgccgcaatgggttcctggaggtatatcctttcacacttgtggctgatgtgaatgctgaccgaaacatggagatcccaaaaggattgattagaagtgccagcgtaactcctaaaatcaatcagctttgctcacaaactaaaggaagttttgtgaatggggtgtttgaggtacataagaaaaatgtaaggggtgaattcacttattatgaaatacaagataatacagggaagatggaagtggtggtgcatggacgactgaccacaatcaactgtgaggaaggagataaactgaaactcacctgctttgaattggcaccgaaaagtgggaataccggggagttgagatctgtaattcatagtcacatcaaggtcatcaagaccaggaaaaacaagaaagacatactcaatcctgattcaagtatggaaacttcaccagactttttcttctaaaatctggatgtcattgacgataatgtttatggagataaggtctaagtgcctaaaaaaatgtacatatacctggttgaaatacaacactatacatacacaccaccatatatactagctgttaatcctatggaatggggtattgggagtgcttttttaatttttcatagtttttttttaataaaatggcatattttgcatctacaacttctataatttgaaaaaataaataaacattatcttttttgtgaaa

SEQ ID NO: 173 - DNA, 643 bp, Homo sapiens
aacacatccaagcttaagacggtgaggtcagcttcacattctcaggaactctccttctttgggtctggctgaagttgaggatctcttactctctaggccacggaattaacccgagcaggcatggaggcctctgctctcacctcatcagcagtgaccagtgtggccaaagtggtcagggtggcctctggctctgccgtagttttgcccctggccaggattgctacagttgtgattggaggagttgtggctgtgcccatggtgctcagtgccatgggcttcactgcggcgggaatcgcctcgtcctccatagcagccaagatgatgtccgcggcggccattgccaatgggggtggagttgcctcgggcagccttgtggctactctgcagtcactgggagcaactggactctccggattgaccaagttcatcctgggctccattgggtctgccattgcggctgtcattgcgaggttctactagctccctgcccctcgccctgcagagaagagaaccatgccaggggagaaggcacccagccatcctgacccagcgaggagccaactatcccaaatatacctggggtgaaatataccaaattctgcatctccagaggaaaataagaaataaagatgaattgttgcaa

SEQ ID NO: 174 - DNA, 1188 bp, Homo sapiens
caaacagcctgcgagcagagcctcctgaggtgtatttcgggtcttgctggggctgagagagaccacagccctttggggggtacaaacaagagttcagttgctgtgaattctgccactgtgcccagctctgaagcctcagctcttgccaaacagacccgagacccatgtcagccccactggatgccgccctccacgcccttcaggaggagcaggccagactcaagatgaggctgtgggacctgcagcagctgagaaaggagctcggggactcccccaaagacaaggtcccattttcagtgcccaagatccccctggtattccgaggacacacccagcaggacccggaagtgcctaagtctttagtttccaatttgcggatccactgccctctgcttgcgggctctgctctgatcacctttgatgaccccaaagtggctgagcaggtgctgcaacaaaaggagcacacgatcaacatggaggagtgccggctgcgggtgcaggtccagcccttggagctgcccatggtcaccaccatccaggtgatgatgtccagccagttgagtggccggagggtgttggtcactggatttcctgccagcctcaggctgagtgaggaggagctgctggacaagctagagatcttctttggcaagactaggaacggaggtggcgatgtggacgttcgggagctactgccagggagtgtcatgctggggtttgctagggatggagtggctcagcgtctgtgccaaatcggccagttcacagtgccactgggtgggcagcaagtccctctgagagtctctccgtatgtgaacggggagatccagaaggctgagatcaggtcgcagccagttccccgctcggtactggtgctcaacattcctgatatcttggatggcccggagctgcatgacgtcctggagatccacttccagaagcccacccgcgggggcggggaggtagaggccctgacagtcgtaccccaaggacagcagggcctagcagtcttcacctctgagtcaggctaggggcctccccttctcatcctccccacccccccgccaaggttctcacactggcctgggcttgggtgcccatataggaggtctgtatgttcaccaacagtgcggaggggtcacacattgcaaaacactgcccagaacagtaaaaagagcctgcatgcca

SEQ ID NO: 175 - DNA, 2627 bp, Homo sapiens
acgcggggctcctgcagcatggctgtcagcaggaaggactggtccgcgctgtccagccttgcccggcagaggactctggaggatgaggaggaacaggagcgcgagcgcaggcggcggcaccgcaacctgagctccaccacggacgatgaggctcccaggctcagccagaatggagaccggcaggcctctgcttctgagagactaccgagcgtggaagaagcagaggtgcccaagccactgcccccagcctccaaagatgaggacgaggacatccagagcatcctcagaacacggcaggagcggaggcagaggcggcaggtggtggaggctgcacaggcccccatccaggagaggctggaggcagaggaggggaggaacagcttgagccctgtgcaggccacacagaaacccctagtctccaagaaggaactggaaatcccacctcgccggagactgagtcgggaacagcggggcccctgggccctggaggaggagagcttggtgggcagggagccagaagagaggaagaaaggggttccagaaaagtccccagtcttggagaagtcctccatgccaaagaagacggcacctgaaaagagcctggtctccgataaaacctccatctctgagaaggtgctggcctcagagaagacatctctatcagagaagatagcagtgtcagagaaaagaaacagctcagagaagaagtctgttctagaaaaaaccagtgtctctgagaagtcgctggccccagggatggcactgggctcaggaaggaggctggtgtctgagaaagcttccatctttgagaaggcactggcctcagagaagagcccaactgcagatgctaagccggccccaaagagggccacagcctcagagcagcccctggcgcaggagccgccagcctctgggggaagcccagccaccaccaaggagcagagaggaagggccctccctgggaagaacctgccctctttggcaaagcagggggcttcagaccctccgactgtggcctcccgcctcccacccgtcacactccaggtgaaaatccccagcaaggaggaagaggcagatatgtcctcacccacacagcgaacctacagcagctccctcaaacgctccagccccaggaccatctcctttcggatgaaacccaagaaagaaaactcggaaacaaccctaactcgcagtgccagcatgaagctcccagacaacacagtgaagttgggagagaagctggagagataccacacggccatacggagatcagaatctgtcaagtctcggggtctgccttgcactgagttattcgtggctcctgtgggtgtagccagcaagcgccacctctttgagaaggaactggcgggccagagccgagcagaaccagcctccagccggaaggagaacttgaggctctcaggggttgtgacatcaaggctcaacctgtggatcagcaggacccaggaatctggagatcaggacccccaggaggcacagaaagcatcatctgcaaccgagaggactcagtggggacagaaatctgactcctcgctggacgctgaggtgtgacaagccccgccaagacagacctgcaagtcttcgtctcaagggacctccctcatgccaggcccctgcctctcacagcagcaccctttcctctcattgtccctgttccctttttgcctgtggatctgtttggccagggtccctggggtcaggaatatttgcaagactcagccagctccttcccagcccagcctcttggggctgggactttctcaccctgcggcaggcacaacagatgctgggacccagtctctgcccaggtcacagcacaagtgcacatcagcactatggggcctatgtcctgcccagagacctctgctccttcctgctcacatccacagtcagggcacggcgcccctcaagaactccagagtcacctgtctcatcggctcccagcaagtgcctctttgtctatgatgtcccccttctctgaggcctggacccacccatctttgtccctggggcctgctcccagccactgaggcccgctctggccaggggagaaggagctgccgtgcgtcttccctgtgccccgtctccctgcttggttctcccctcccttccctggccggctgccatggccaggagctaagtgcctttttgtgtgcaaccacttaccctttctctgaaaaacctgttctcaggaaggatctgataaactcatttactctcaggtgtaagagactgatgagaccttagaagcgaattcctctctggaggccttgctttctagcagaggtcacctgaagtgtgtgaggaggatcatcattttcctcatcccccctcttctcacattaaggtggtggcttgccactcagcagtcctagcttggtgactgggaactgccacatacagggccaggcctaccctccttccccacaagccccctccaacccccacccccatgctctggacctcatggctcctatgagcttggagcatggtgaaccatcagagaatctagaaccaaccaagctaggaacatcagcctggtgccctgttaaccccttaaagctgtggtttacaacttttcaaaaatttaaatcattagaactctc

SEQ ID NO: 176 - DNA, 820 bp, Homo sapiens
actcgccacctcctcttccacccctgccaggcccagcagccaccacagcgcctgcttcctcggccctgaaatcatgcccctaggtctcctgtggctgggcctagccctgttgggggctctgcatgcccaggcccaggactccacctcagacctgatcccagccccacctctgagcaaggtccctctgcagcagaacttccaggacaaccaattccaggggaagtggtatgtggtaggcctggcagggaatgcaattctcagagaagacaaagacccgcaaaagatgtatgccaccatctatgagctgaaagaagacaagagctacaatgtcacctccgtcctgtttaggaaaaagaagtgtgactactggatcaggacttttgttccaggttgccagcccggcgagttcacgctgggcaacattaagagttaccctggattaacgagttacctcgtccgagtggtgagcaccaactacaaccagcatgctatggtgttcttcaagaaagtttctcaaaacagggagtacttcaagatcaccctctacgggagaaccaaggagctgacttcggaactaaaggagaacttcatccgcttctccaaatctctgggcctccctgaaaaccacatcgtcttccctgtcccaatcgaccagtgtatcgacggctgagtgcacaggtgccgccagctgccgcaccagcccgaacaccattgagggagctgggagaccctccccacagtgccacccatgcagctgctccccaggccaccccgctgatggagccccaccttgtctgctaaataaacatgtgccctcagg

SEQ ID NO: 177 - DNA, 2202 bp, Homo sapiens
atactgggagaggcttctgggtcaaaggaccagtctgcagagggatcctgtggctggaagcgaggaggctccacacggccgttgcagctaccgcagccaggatctgggcatccaggcacggccatgacccctccgaggctcttctgggtgtggctgctggttgcaggaacccaaggcgtgaacgatggtgacatgcggctggccgatgggggcgccaccaaccagggccgcgtggagatcttctacagaggccagtggggcactgtgtgtgacaacctgtgggacctgactgatgccagcgtcgtctgccgggccctgggcttcgagaacgccacccaggctctgggcagagctgccttcgggcaaggatcaggccccatcatgctggatgaggtccagtgcacgggaaccgaggcctcactggccgactgcaagtccctgggctggctgaagagcaactgcaggcacgagagagacgctggtgtggtctgcaccaatgaaaccaggagcacccacaccctggacctctccagggagctctcggaggcccttggccagatctttgacagccagcggggctgcgacctgtccatcagcgtgaatgtgcagggcgaggacgccctgggcttctgtggccacacggtcatcctgactgccaacctggaggcccaggccctgtggaaggagccgggcagcaatgtcaccatgagtgtggatgctgagtgtgtgcccatggtcagggaccttctcaggtacttctactcccgaaggattgacatcaccctgtcgtcagtcaagtgcttccacaagctggcctctgcctatggggccaggcagctgcagggctactgcgcaagcctctttgccatcctcctcccccaggacccctcgttccagatgcccctggacctgtatgcctatgcagtggccacaggggacgccctgctggagaagctctgcctacagttcctggcctggaacttcgaggccttgacgcaggccgaggcctggcccagtgtccccacagacctgctccaactgctgctgcccaggagcgacctggcggtgcccagcgagctggccctactgaaggccgtggacacctggagctggggggagcgtgcctcccatgaggaggtggagggcttggtggagaagatccgcttccccatgatgctccctgaggagctctttgagctgcagttcaacctgtccctgtactggagccacgaggccctgttccagaagaagactctgcaggccctggaattccacactgtgcccttccagttgctggcccggtacaaaggcctgaacctcaccgaggatacctacaagccccggatttacacctcgcccacctggagtgcctttgtgacagacagttcctggagtgcacggaagtcacaactggtctatcagtccagacgggggcctttggtcaaatattcttctgattacttccaagccccctctgactacagatactacccctaccagtccttccagactccacaacaccccagcttcctcttccaggacaagagggtgtcctggtccctggtctacctccccaccatccagagctgctggaactacggcttctcctgctcctcggacgagctccctgtcctgggcctcaccaagtctggcggctcagatcgcaccattgcctacgaaaacaaagccctgatgctctgcgaagggctcttcgtggcagacgtcaccgatttcgagggctggaaggctgcgattcccagtgccctggacaccaacagctcgaagagcacctcctccttcccctgcccggcagggcacttcaacggcttccgcacggtcatccgccccttctacctgaccaactcctcaggtgtggactagacggcgtggcccaagggtggtgagaaccggagaaccccaggacgccctcactgcaggctcccctcctcggcttccttcctctctgcaatgaccttcaacaaccggccaccagatgtcgccctactcacctgagcgctcagcttcaagaaattactggaaggcttccactagggtccaccaggagttctcccaccacctcaccagtttccaggtggtaagcaccaggacgccctcgaggttgctctgggatccccccacagcccctggtcagtctgcccttgtcactggtctgaggtcattaaaattacattgaggttccta

SEQ ID NO: 178 - DNA, 3779 bp, Homo sapiens
actgaccatttggcgatccattgagaggagggtttggaaaagtggctcctttgtgacagctctcgccagattggggggctgctgatttgcatctcattagccatgcgggcggccggctgaatataagggcggcaggcgccggcgagagccagatcctctgcgcgcacccgcggagacccgacccggccgagggcagagcgcaggggaacccgggcagccgcggcgcagagcctcctcccacggcccggcccctccggtcctgcgcgtgtgtactggatggcattggctggattcatcggaaagacgcggatctttgctgtgacaccggagatcggagcccggagtgctcccggaacgaccgccgccgccgagtgacaccgggccgcgatccgcaggggccgccgcgcacacccgccgccgccgaccgtcccctcagcgcgcgccgctggccccggattatcgccttgcccgtgggatttccagaccgcggctttctaatcggctcgggaggaagctctgcagctctcttgggaattaagctcaatctctggactctctctctttctctttctccccctccctctcctgcgaagaagctcaagacaaaaccaggaagccggcgaccctcacctcctcgggggctgggaggaaggaggaaaacgaaagtcgccgccgccgcgctgtcccccgagagctgcctttcctcgggcatccctggggctgccgcgggacctcgcagggcggatataaagaaccgcggccttgggaagaggcggagaccggcttttaaagaaagaagtcctgggtcctgcggtctggggcgaggcaagggcgcttttctgcccacgctccccgtggcccatcgatcccccgcgcgtccgccgctgttctaaggagagaagtgggggccccccaggctcgcgcgtggagcgaagcagcatgggcagtcggtgcgcgctggccctggcggtgctctcggccttgctgtgtcaggtctggagctctggggtgttcgaactgaagctgcaggagttcgtcaacaagaaggggctgctggggaaccgcaactgctgccgcgggggcgcggggccaccgccgtgcgcctgccggaccttcttccgcgtgtgcctcaagcactaccaggccagcgtgtcccccgagccgccctgcacctacggcagcgccgtcacccccgtgctgggcgtcgactccttcagtctgcccgacggcgggggcgccgactccgcgttcagcaaccccatccgcttccccttcggcttcacctggccgggcaccttctctctgattattgaagctctccacacagattctcctgatgacctcgcaacagaaaacccagaaagactcatcagccgcctggccacccagaggcacctgacggtgggcgaggagtggtcccaggacctgcacagcagcggccgcacggacctcaagtactcctaccgcttcgtgtgtgacgaacactactacggagagggctgctccgttttctgccgtccccgggacgatgccttcggccacttcacctgtggggagcgtggggagaaagtgtgcaaccctggctggaaagggccctactgcacagagccgatctgcctgcctggatgtgatgagcagcatggattttgtgacaaaccaggggaatgcaagtgcagagtgggctggcagggccggtactgtgacgagtgtatccgctatccaggctgtctccatggcacctgccagcagccctggcagtgcaactgccaggaaggctgggggggccttttctgcaaccaggacctgaactactgcacacaccataagccctgcaagaatggagccacctgcaccaacacgggccaggggagctacacttgctcttgccggcctgggtacacaggtgccacctgcgagctggggattgacgagtgtgaccccagcccttgtaagaacggagggagctgcacggatctcgagaacagctactcctgtacctgcccacccggcttctacggcaaaatctgtgaattgagtgccatgacctgtgcggacggcccttgctttaacgggggtcggtgctcagacagccccgatggagggtacagctgccgctgccccgtgggctactccggcttcaactgtgagaagaaaattgactactgcagctcttcaccctgttctaatggtgccaagtgtgtggacctcggtgatgcctacctgtgccgctgccaggccggcttctcggggaggcactgtgacgacaacgtggacgactgcgcctcctccccgtgcgccaacgggggcacctgccgggatggcgtgaacgacttctcctgcacctgcccgcctggctacacgggcaggaactgcagtgcccccgtcagcaggtgcgagcacgcaccctgccacaatggggccacctgccacgagaggggccaccgctatgtgtgcgagtgtgcccgaggctacgggggtcccaactgccagttcctgctccccgagctgcccccgggcccagcggtggtggacctcactgagaagctagagggccagggcgggccattcccctgggtggccgtgtgcgccggggtcatccttgtcctcatgctgctgctgggctgtgccgctgtggtggtctgcgtccggctgaggctgcagaagcaccggcccccagccgacccctgccggggggagacggagaccatgaacaacctggccaactgccagcgtgagaaggacatctcagtcagcatcatcggggccacgcagatcaagaacaccaacaagaaggcggacttccacggggaccacagcgccgacaagaatggcttcaaggcccgctacccagcggtggactataacctcgtgcaggacctcaagggtgacgacaccgccgtcagggacgcgcacagcaagcgtgacaccaagtgccagccccagggctcctcaggggaggagaaggggaccccgaccacactcaggggtggagaagcatctgaaagaaaaaggccggactcgggctgttcaacttcaaaagacaccaagtaccagtcggtgtacgtcatatccgaggagaaggatgagtgcgtcatagcaactgaggtgtaaaatggaagtgagatggcaagactcccgtttctcttaaaataagtaaaattccaaggatatatgccccaacgaatgctgctgaagaggagggaggcctcgtggactgctgctgagaaaccgagttcagaccgagcaggttctcctcctgaggtcctcgacgcctgccgacagcctgtcgcggcccggccgcctgcggcactgccttccgtgacgtcgccgttgcactatggacagttgctcttaagagaatatatatttaaatgggtgaactgaattacgcataagaagcatgcactgcctgagtgtatattttggattcttatgagccagtcttttcttgaattagaaacacaaacactgcctttattgtcctttttgatacgaagatgtgctttttctagatggaaaagatgtgtgttattttttggatttgtaaaaatatttttcatgatatctgtaaagcttgagtattttgtgatgttcgttttttataatttaaattttggtaaatatgtacaaaggcacttcgggtctatgtgactatatttttttgtatataaatgtatttatggaatattgtgcaaatgttatttgagttttttactgttttgttaatgaagaaattcctttttaaaatatttttccaaaataaattttatgaatgacaa

SEQ ID NO: 179 - DNA, 862 bp, Homo sapiens
agagaggttgagaacaacccagaaaccttcacctctcatgctgaagctcacacccttgccctccaagatgaaggtttctgcagcgcttctgtgcctgctgctcatggcagccactttcagccctcagggacttgctcagccagattcagtttccattccaatcacctgctgctttaacgtgatcaataggaaaattcctatccagaggctggagagctacacaagaatcaccaacatccaatgtcccaaggaagctgtgatcttcaagaccaaacggggcaaggaggtctgtgctgaccccaaggagagatgggtcagggattccatgaagcatctggaccaaatatttcaaaatctgaagccatgagccttcatacatggactgagagtcagagcttgaagaaaagcttatttattttccccaacctcccccaggtgcagtgtgacattattttattataacatccacaaagagattatttttaaataatttaaagcataatatttcttaaaaagtatttaattatatttaagttgttgatgttttaactctatctgtcatacatcctagtgaatgtaaaatgcaaaatcctggtgatgtgttttttgtttttgttttcctgtgagctcaactaagttcacggcaaaatgtcattgttctccctcctacctgtctgtagtgttgtggggtcctcccatggatcatcaaggtgaaacactttggtattctttggcaatcagtgctcctgtaagtcaaatgtgtgctttgtactgctgttgttgaaattgatgttactgtatataactatggaattttgaaaaaaaatttcaaaaagaaaaaaatatatataatttaaaacta

SEQ ID NO: 180 - DNA, 2876 bp, Homo sapiens
gaggtttctggagggtgtggcccccagagggcatggaagctctgcacccctgctcccatacctcaccctacgcatctcctcatctgtatcctttgcaatatcctttgtaataaaccgaaaattttatcataatgagcatcaaaagaatcccaaatgagaaaactgctttttgcataagtgtaaattaagagatggaagtcacatttcaccatggcaaacatttgctgcatgcaaaatgactgaaacaaggtcttgatctgtcaccaggctgaagtgcagtggtacaatcaaagctcactgcagtctcaacctcctaggctcaaacaatcctcccacttcagcctcccaaccagctgggaccacaggttgacatcaccacacccaggtctgctggaatttgctggaggtccactccagaccctgtttgtctggatatcaccagcagaggttgcagaacaacaaagattgctgcctgttccttcctctggaagctttgtcccagaggggcacccaccagacggcagctggagctctcctgtgtgccactggagtacgaaaaagaaaaaatcctgcagctagctcggtgtctgcccaaacggctgcccagttttgtgcttgaaacccagggcctgggtggtgtaggcacccgagggaattgcctggtctaagggttgtgaagatcacggaaaaggcatagagtctgggccggaatgcatcgttcctcgtggcacattccctcatggcttcccttagctaggggaggaagttccctggccccttgcacttcccgttccctctgctatggctcttcctcagtagaaacaactggcaacaaaattcaagtttatgattcattcatcagcaaacatgtgagaatcatctacaaagaaccaagaattgtgagaaagcgacctcaagatacaactggcaactgaggaaaaggcctcaattcaacaagagctaacaagcttgggagtttatttcggaatctttaaaagactcttctgcttacccacaatctgggatccactgcaggaaaacaaaaaaggaaaacttcatttaaaagaagcaagaagtaaaatgggacaaattgggaatgtttaagtctctgaaactctgcactgaaaagaaaataagattgataacttaagcttaacattctgaggcataaagaaacattaactttggagtattcatcttgactactgaaatacaagtttagaagacaagtggtttcattctggtcacagatcacagcttttctttaaatttataatcctatgggttggactcgttgactgtattttttaaaggttgctcgtcagttaactgagccttggaattcatggattttctaaagactaacaaatgaaaatattttcctgttgaagaacccagcggaaattttacagcaacaaatttcatgtttcttttgggtatttctgagaaaaaggaaatatttataaaaccatccaaagatccagataatttgcaaataaattggaggttatagaggttataatctgaatcccaaaggagactgcagctgatgaaagtgcttccaaactgaaaattggacgtgcctttacgatggtaagcgttaacagctcccactgcttctataatgactcctttaagtacactttgtatgggtgcatgttcagcatggtgtttgtgcttgggttaatatccaattgtgttgccatatacattttcatctgcgtcctcaaagtccgaaatgaaactacaacttacatgattaacttggcaatgtcagacttgctttttgtttttactttacccttcaggattttttacttcacaacacggaattggccatttggagatttactttgtaagatttctgtgatgctgttttataccaacatgtacggaagcattctgttcttaacctgtattagtgtagatcgatttctggcaattgtctacccatttaagtcaaagactctaagaaccaaaagaaatgcaaagattgtttgcactggcgtgtggttaactgtgatcggaggaagtgcacccgccgtttttgttcagtctacccactctcagggtaacaatgcctcagaagcctgctttgaaaattttccagaagccacatggaaaacatatctctcaaggattgtaattttcatcgaaatagtgggattttttattcctctaattttaaatgtaacttgttctagtatggtgctaaaaactttaaccaaacctgttacattaagtagaagcaaaataaacaaaactaaggttttaaaaatgatttttgtacatttgatcatattctgtttctgttttgttccttacaatatcaatcttattttatattctcttgtgagaacacaaacatttgttaattgctcagtagtggcagcagtaaggacaatgtacccaatcactctctgtattgctgtttccaactgttgttttgaccctatagtttactactttacatcggacacaattcagaattcaataaaaatgaaaaactggtctgtcaggagaagtgacttcagattctctgaagttcatggtgcagagaattttattcagcataacctacagaccttaaaaagtaagatatttgacaatgaatctgctgcctgaaataaaaccattaggactcactgggacagaactttcaagttccttcaactgtgaaaagtgtctttttggacaaactatttttccacctccaaaagaaattaacacatggacattttaaagtctttagtataaagaaaatttgtattcaatgtgttaagcattaacatgtattttatttgtgtatccactccatctgatttttctgagccattttgatttgttccttcattaaaaaaaatctcttaaagtta

SEQ ID NO: 181 - DNA, 2882 bp, Homo sapiens
atctgaaaaattaataattccttaattatcaaatatccattatttaaatttataattgtgtcataaatattgtcataaatagatttgctgttttaaagcttgttccttcattttctctgttttgttttagataaacattgtcataaatagatttgttgttttaaagcttgttccttcattttctctgattgttttgttttagattcagaggttacttatgcttgtttgttacatggatgttacatgtgtaatgggggatattggacttctagtgtactcatcacccatatactgaacactgtactcaaaagggattgaaagaaactaggaaacttggcaggaagatcattcttaagccaggaaaaaaatttttaatgctcacatgtgaacatgtgatggtcataccagaaggagcacccacctccctccctctgtgacagacacattttcttagccttcacctttccttctttcaagttgctgaaaatccacagtgtttctgttcatttgttactttcattctcacctatcttctctcttgctccatctaccagaacaataattccccatataatacttctcacttcacttttcaacgcaggacctcttgttgggtctgatctgtttgtctgtccgctttatcaatattatcagatgtaagtttacatgaatacacacacatattcactaaactgaggggaaaaaatgccttgtaggtcataaaaaagcagggaaattcccaacaattcatatttgatccctggatccaggggtggcagcaataagcctgctttagatatttactccccattttatgatccggtggtttggtttttcaaatgatgatatggctcctttcgcaatgacttgatgtttaggaggtgtgcttcaataaatacattttaaaatcaacaatcaagttagagttgtacaaatggctctgaaatgtcccactacactgttagaccaagggcacagattgtgcttctgtactatttatcctagtatccctcggcatatattaactgctctaaaaatctccttggctacacgctgcatcaaatcaaagttaaatgttataccacctttctattctatttttaatattcaaagagggtgctcagattttagaacaaatttcaatgtttaagtacacacaaaaaaatcattaactcatatatttcaagagtaggaaatgggaactggtgttaaaactcttataacaaatgtcactgtcttaagggacagtgtttaaaaacgcatacctggccgggcgcggtggctcatgcctgtaatcccagcactttgggaggccgaggccggcggatcacaaggaaaacaaactcaggaagaaaaagaaaagcagaagtgatcaaggagagcgctcgagttgcaatattttcctttggctgctgacaggcagttactataaagcattgtgcatggacaccatcttcttgtattatacaagaaaggagtgtacctatcacacacagggggaaaaatgctcttttgggtgctaggcctcctaatcctctgtggttttctgtggactcgtaaaggaaaactaaagattgaagacatcactgataagtacatttttatcactggatgtgactcgggctttggaaacttggcagccagaacttttgataaaaagggatttcatgtaatcgctgcctgtctgactgaatcaggatcaacagctttaaaggcagaaacctcagagagacttcgtactgtgcttctggatgtgaccgacccagagaatgtcaagaggactgcccagtgggtgaagaaccaagttggggagaaaggtctctggggtctgatcaataatgctggtgttcccggcgtgctggctcccactgactggctgacactagaggactacagagaacctattgaagtgaacctgtttggactcatcagtgtgacactaaatatgcttcctttggtcaagaaagctcaagggagagttattaatgtctccagtgttggaggtcgccttgcaatcgttggagggggctatactccatccaaatatgcagtggaaggtttcaatgacagcttaagacgggacatgaaagcttttggtgtgcacgtctcatgcattgaaccaggattgttcaaaacaaacttggcagatccagtaaaggtaattgaaaaaaaactcgccatttgggagcagctgtctccagacatcaaacaacaatatggagaaggttacattgaaaaaagtctagacaaactgaaaggcaataaatcctatgtgaacatggacctctctccggtggtagagtgcatggaccacgctctaacaagtctcttccctaagactcattatgccgctggaaaagatgccaaaattttctggatacctctgtctcacatgccagcagctttgcaagactttttattgttgaaacagaaagcagagctggctaatcccaaggcagtgtgactcagctaaccacaaatgtctcctccaggctatgaaattggccgatttcaagaacacatctccttttcaaccccattccttatctgctccaacctggactcatttagatcgtgcttatttggattgcaaaagggagtcccaccatcgctggtggtatcccagggtccctgctcaagttttctttgaaaaggagggctggaatggtacatcacataggcaagtcctgccctgtatttaggctttgcctgcttggtgtgatgtaagggaaattgaaagacttgcccattcaaaatgatctttaccgtggcctgccccatgcttatggtccccagcatttacagtaacttgtgaatgttaagtatcatctcttatctaaatattaaaagataagtcaaacattaaaaaaaaaaaaaaaaaa

SEQ ID NO: 182 - DNA, 3735 bp, Homo sapiens
agcgatctccgagcgaggcggcaagatggacgcgggatttttccgcggaacaagtgcagaacaggataatcggttcagcaacaaacagaagaaactactgaagcagctgaaatttgcagaatgcctagaaaaaaaggtggacatgagcaaagtaaatttggaggttataaagccttggataacaaaaagagtaacggaaatccttgggtttgaagatgatgttgtgattgagtttatattcaaccagctggaagtgaagaatccagactccaaaatgatgcaaatcaacctgactggatttttgaatggaaaaaatgctcgagaatttatgggagaactgtggcccctgctgctaagtgcacaagaaaacatcgcgggaatcccttctgctttcctagaactgaagaaagaagaaataaaacaaagacagattgaacaagaaaaactggcatctatgaaaaagcaagatgaagacaaagataaaagagataaggaagaaaaagaaagcagcagagaaaaaagggagcggtctcgtagcccaagaagacgcaaatccagatctccttcccctagaagacgatcttcccctgtcaggagagagagaaagcgcagtcattctcgatctccccgtcacagaaccaagagccggagtccttcccctgctccagaaaagaaggaaaaaactccagagctcccagaaccttcagtgaaagtaaaagaaccttcagtacaagaggctacttctactagtgacattctgaaagttcccaaacctgaacctataccagagcctaaagaaccttctccggaaaaaaattccaaaaaagaaaaggagaaggagaagacccgaccacgatctcggtcacgctccaaatcaagatcccggacgcggtcccgctctccttctcacactcgacctagacggcgccatagatcccgatcaagatcgtattcacctagaaggcggccaagcccaagaaggcggccatctcctcgaagaagaactccgccaagaagaatgcctcctccaccaaggcatagaaggagtagatctccagtaagacgaagaagacgttcgtcagcatccttgtctgggagtagctcatcatcctcttcatctcgttcacggtcaccaccaaagaagcctcccaagaggacatccagcccccctcggaaaactcgtaggttatctccttcagcaagtcctccaaggcgaaggcacaggccatcacctcctgcaactccaccacccaaaactcggcattcccctacaccccagcagtcaaaccgtacaagaaaaagtcgtgtttctgtgtctccagggagaacttcaggtaaagtgacaaaacataaaggtactgagaaaagagaatccccttcaccagcaccgaagcctagaaaagtagagttatctgaatcggaagaagataaaggtggcaaaatggctgcagcagattctgtgcagcagagacgccaatacagacgacaaaaccagcagtcttcatctgactctggctcctcctcctcctcagaagatgaacgacccaagagatcccatgtgaagaatggtgaggttggcaggcggcggagacattccccttcccggagtgcttctccatcaccacgaaagcgccaaaaagagacttcccctcgtggtagacggaggagaagtccatccccaccacccaccagaaggcgacggtctccttctcccgcccctcctcctcgacggcgcaggactcccacaccaccaccacgacgaaggactccttctcctcccccacgtcggcgctcaccttctcctagaagatactctcctccaatacagaggagatactctccttctccacctccaaagagaagaacggcttcacctcctccccctcctaaacgaagagcatcaccatctccaccaccaaagcggcgggtctcccattctccacctcccaaacaaagaagctccccagtcaccaagagacgttcaccttcattatcatccaagcataggaaagggtcttccccaagccgctctacccgggaggcccgatcaccacaaccaaacaaacggcattcgccctcaccacggcctcgagctcctcagacctcctcaagtcctccacccgttcgaagaggagcgtcgtcatcaccccaaagaaggcagtccccgtctccaagtactaggcccattaggagagtctccaggactccggaacctaaaaagataaaaaaggctgcttccccaagcccacagtctgtaagaagggtctcatcctcccgatctgtctccgggtctcctgagccagcagctaaaaagcccccagcacctccatcccccgtccagtctcagtcaccgtctacaaactggtcaccagctgtaccggtcaaaaaggccaaaagcccaacaccgagcccatcaccgccaagaaattcagatcaggaaggaggtggaaagaaaaagaagaaaaagaaggacaagaaacacaaaaaggataagaagcacaagaagcacaaaaaacacaagaaggaaaaggctgtggctgcagctgctgcagctgctgtgacccctgcagccattgcagctgccacaaccacattagcacaggaagagccagtggcagcgccagagccgaagaaggagactgaaagtgaagctgaagataaccttgatgatttagaaaagcacctgcgtgaaaaggccctgagatcaatgaggaaggcccaagtgtccccacagtcttagggggaaatgtttgttatgatgtaaattttatttggtttgtacgcagttcaatttcaaaattgctaaaatgtgtttgagctttagactataacatttgttgtaataattgctaggttgaagttcaacatgtaaaaaaagggggcatggatttacattgcaaaaggtgtccacagtgtattagtgacattctttcattgacagctgacataattcattgagtgaaatattttaagccaaaaaaaaattccctttttaaaaaagggggtttaaatactgttggcatttttatggttcctttaaatgccctagctattcccagaggggtttttttgtttgtttttttggttttgattttctttttgtttttctttcttcttcttatttttttcatttgagtcttagctcccatttaagttatgcttctgaccttgtatggtctgtaagcttgcccagaaataagaccactgttttgaactaccacaaaagtataaatgaatattttaatgccacaatctttcctgttgcctgtggagtctctgctgaaatgaatcaggattcgagctctaggatgagacagaaaatgaaagcatgttgtttgccaggacactgtgggtttatattgatgtgtaacaagttgatttggaacactggactctcattctgttattctggttttgttttttttgttttgttttttttcttttgtaaaggcaatgagctagtcccagaaaggatccttcagttacatacaatttgtttaatgaaatgtcatggctctgttcatatttttgtcttgttcttccaattggtatatacaactttcagagcctcttgtatttggaaggctggaagggcccagactttggaatagtgtcttggtttcactgtttttgttttgattttttttttgttttgattttttttaaactaaagctatataaagcttgtggattaaacagaataaatttctaaatttaaaaattttgccactctta

SEQ ID NO: 183 - DNA, 1544 bp, Homo sapiens
agaaggcggaaccgctgctgggagacggcgggatctctttcgccatggctgccgggccgatctccgagcggaatcaggatgccactgtgtacgtggggggcctggatgagaaggttagtgaaccgctgctgtgggaactgtttctccaggctggaccagtagtcaacacccacatgccaaaggatagagtcactggccagcaccaaggctatggctttgtggaattcttgagtgaggaagatgctgactatgccattaagatcatgaacatgatcaaactctatgggaagccaatacgggtgaacaaagcatcagctcacaacaaaaacctggatgtaggggccaacattttcattgggaacctggaccctgagattgatgagaagttgctttatgatactttcagcgcctttggggtcatcttacaaacccccaaaattatgcgggaccctgacacaggcaactccaaaggttatgcctttattaattttgcttcatttgatgcttcggatgcagcaattgaagccatgaatgggcagtacctctgtaaccgtcctatcaccgtatcttatgccttcaagaaggactccaagggtgagcgccatggctcagcagccgaacgacttctggcagctcagaacccgctctcccaggctgatcgccctcatcagctgtttgcagatgcacctcctccaccctctgctcccaatcctgtggtatcatcattggggtctgggcttcctccaccaggcatgcctcctcctggctccttcccacccccagtgccacctcctggagccctcccacctgggatacccccagccatgcccccaccacctatgcctcctggggctgcaggacatggccccccatcggcaggaaccccaggggcaggacatcctggtcatggacactcacatcctcacccattcccaccgggtgggatgccccatccagggatgtctcagatgcagcttgcacaccatggccctcatggcttaggacatccccacgctggacccccaggctctgggggccagccaccgccccgaccaccacctggaatgcctcatcctggacctcctccaatgggcatgcccccccgagggcctccattcggatctcccatgggtcacccaggtcctatgcctccgcatggtatgcgtggacctcctccactgatgcccccccatggatacactggccctccacgacccccaccctatggctaccagcgggggcctctccctccacccagacccactccccggccaccagttccccctcgaggcccacttcgaggccctctccctcagtaaattcacattttccttcctcctgttacattttcccaatatcttttctattccttggaccaatcagagatgctgtagctccttggggcaaaggtactaatccctttcagcacccccactccattcccctttttaatgtaactttttccacaggaggtatttcttttttatgttggtcctgagtattttgcaaatgcacagagaaaataaaactaaactccttgttta

SEQ ID NO: 184 - DNA, 2416 bp, Homo sapiens
attcagttggccactgctgagcagctgagaaggtggcgacgtaggggccatggggctgggccgggtcctgctgtttctggccgtcgccttcccttttgcacccccggcagccgccgctgagccccacagtcttcgttacaacctcatggtgctgtcccaggatggatctgtgcagtcagggtttctcgctgagggacatctggatggtcagcccttcctgcgctatgacaggcagaaacgcagggcaaagccccagggacagtgggcagaaaatgtcctgggagctaagacctgggacacagagaccgaggacttgacagagaatgggcaagacctcaggaggaccctgactcatatcaaggaccagaaaggaggcttgcattccctccaggagattagggtctgtgagatccatgaagacagcagcaccaggggctcccggcatttctactacgatggggagctcttcctctcccaaaacctggagactcaagaatcgacagtgccccagtcctccagagctcagaccttggctatgaacgtcacaaatttctggaaggaagatgccatgaagaccaagacacactatcgcgctatgcaggcagactgcctgcagaaactacagcgatatctgaaatccggggtggccatcaggagaacagtgccccccatggtgaatgtcacctgcagcgaggtctcagagggcaacatcaccgtgacatgcagggcttccagcttctatccccggaatatcacactgacctggcgtcaggatggggtatctttgagccacaacacccagcagtggggggatgtcctgcctgatgggaatggaacctaccagacctgggtggccaccaggattcgccaaggagaggagcagaggttcacctgctacatggaacacagcgggaatcacggcactcaccctgtgccctctgggaaggcgctggtgcttcagagtcaacggacagactttccatatgtttctgctgctatgccatgttttgttattattattattctctgtgtcccttgttgcaagaagaaaacatcagcggcagagggtccagagcttgtgagcctgcaggtcctggatcaacacccagttgggacaggagaccacagggatgcagcacagctgggatttcagcctctgatgtcagctactgggtccactggttccactgagggcacctagactctacagccaggcggccaggattcaactccctgcctggatctcaccagcactttccctctgtttcctgacctatgaaacagagaaaataacatcacttatttattgttgttggatgctgcaaagtgttagtaggtatgaggtgtttgctgctctgccacgtagagagccagcaaagggatcatgaccaactcaacattccattggaggctatatgatcaaacagcaaattgtttatcatgaatgcaggatgtgggcaaactcacgactgctcctgccaacagaaggtttgctgagggcattcactccatggtgctcattggagttatctactgggtcatctagagcctattgtttgaggaatgcagtcttacaagcctactctggacccagcagctgactccttcttccacccctcttcttgctatctcctataccaataaatacgaagggctgtggaagatcagagcccttgttcacgagaagcaagaagccccctgaccccttgttccaaatatactcttttgtctttctctttattcccacgttcgccctttgttcagtccaatacagggttgtggggcccttaacagtgccatattaattggtatcattatttctgttgtttttgtttttgtttttgtttttgtttttgagacagagtctcactctgtcacccaggctgcagttcactggtgtgatctcagctcactgcaacctctgcctcccaggttcaagcacttctcgtacctcagactcccgaatagctgggattacagacaggcaccaccacacccagctaatttttgtattttttgtagagacggggtttcgccaagttgaccagcccagtttcaaactcctgacctcaggtgatctgcctgccttggcatcccaaagtgctgggattacaagaatgagccaccgtgcctggcctattttattatattgtaatatattttattatattagccaccatgcctgtcctattttcttatgttttaatatattttaatatattacatgtgcagtaattagattatcatgggtgaactttatgagtgagtatcttggtgatgactcctcctgaccagcccaggaccagctttcttgtcaccttgaggtcccctcgccccgtcacaccgttatgcattactctgtgtctactattatgtgtgcataatttataccgtaaatgtttactctttaaataga

SEQ ID NO: 185 - DNA, 9411 bp, Homo sapiens
cctttctaactgtggcccgcgttgtgctgttgctgggcaggcgttgggcgccggcggtcttcgagcgtgggggcccgctggctttcccttctcagaaactgcgccgggggcgctcgcttgccccggattcggacgcggcgctccccgggctcgtctgaagtgcagatcgccgcagaggccccagtgcccggatgtccatcaggattagcgcgagccaatacgggccgagcccggggctgcgccgaggacgcccggggctcgagagcaggtagtcccgtaacatcggggcgccgcgccgggacgcgtccccgcccggctccgccaaatggtgagcgcggcgctggcagcagggcccgcggggtgaaggcgctcatggacggaagacccctggctctataagctgaattatggcagcccagtcaagtttgtacaatgacgacagaaacctgcttcgaattagagagaaggaaagacgcaaccaggaagcccaccaagagaaagaggcatttcctgaaaagattcccctttttggagagccctacaagacagcaaaaggtgatgagctgtctagtcgaatacagaacatgttgggaaactacgaagaagtgaaggagttccttagtactaagtctcacactcatcgcctggatgcttctgaaaataggttgggaaagccgaaatatcctttaattcctgacaaagggagcagcattccatccagctccttccacactagtgtccaccaccagtccattcacactcctgcgtctggaccactttctgttggcaacattagccacaatccaaagatggcgcagccaagaactgaaccaatgccaagtctccatgccaaaagctgcggcccaccggacagccagcacctgacccaggatcgccttggtcaggaggggttcggctctagtcatcacaagaaaggtgaccgaagagctgacggagaccactgtgcttcggtgacagattcggctccagagagggagctttctcccttaatctctttgccttccccagttccccctttgtcacctatacattccaaccagcaaactcttccccggacgcaaggaagcagcaaggttcatggcagcagcaataacagtaaaggctattgcccagccaaatctcccaaggacctagcagtgaaagtccatgataaagagacccctcaagacagtttggtggcccctgcccagccgccttctcagacatttccacctccctccctcccctcaaaaagtgttgcaatgcagcagaagcccacggcttatgtccggcccatggatggtcaagatcaggcccctagtgaatcccctgaactgaaaccactgccggaggactatcgacagcagacctttgaaaaaacagacttgaaagtgcctgccaaagccaagctcaccaaactgaagatgccttctcagtcagttgagcagacctactccaatgaagtccattgtgttgaagagattctgaaggaaatgacccattcatggccgcctcctttgacagcaatacatacgcctagtacagctgagccatccaagtttcctttccctacaaaggactctcagcatgtcagttctgtaacccaaaaccaaaaacaatatgatacatcttcaaaaactcactcaaattctcagcaaggaacgtcatccatgctcgaagacgaccttcagctcagtgacagtgaggacagtgacagtgaacaaaccccagagaagcctccctcctcatctgcacctccaagtgctccacagtcccttccagaaccagtggcatcagcacattccagcagtgcagagtcagaaagcaccagtgactcagacagttcctcagactcagagagcgagagcagttcaagtgacagcgaagaaaatgagcccctagaaaccccagctccggagcctgagcctccaacaacaaacaaatggcagctggacaactggctgaccaaagtcagccagccagctgcgccaccagagggccccaggagcacagagcccccacggcggcacccagagagtaagggcagcagcgacagtgccacgagtcaggagcattctgaatccaaagatcctccccctaaaagctccagcaaagccccccgggccccacccgaagccccccaccccggaaagaggagctgtcagaagtctccggcacagcaggagcccccacaaaggcaaaccgttggaaccaaacaacccaaaaaacctgtcaaggcctctgcccgggcaggttcacggaccagcctgcagggggaaagggagccagggcttcttccctatggctcccgagaccagacttccaaagacaagcccaaggtgaagacgaaaggacggccccgggccgcagcaagcaacgaacccaagccagcagtgcccccctccagtgagaagaagaagcacaagagctccctccctgccccctctaaggctctctcaggcccagaacccgcgaaggacaatgtggaggacaggacccctgagcactttgctcttgttcccctgactgagagccagggcccaccccacagtggcagcggcagcaggactagtggctgccgccaagccgtggtggtccaggaggacagccgcaaagacagactcccattgcctttgagagacaccaagctgctctcaccgctcagggacactcctcccccacaaagcttgatggtgaagatcaccctagacctgctctctcggataccccagcctcccgggaaggggagccgccagaggaaagcagaagataaacagccgcccgcagggaagaagcacagctctgagaagaggagctcagacagctcaagcaagttggccaaaaagagaaagggtgaagcagaaagagactgtgataacaagaaaatcagactggagaaggaaatcaaatcacagtcatcttcatcttcatcctcccacaaagaatcttctaaaacaaagccctccaggccctcctcacagtcctcaaagaaggaaatgctccccccgccacccgtgtcctcgtcctcccagaagccagccaagcctgcacttaagaggtcaaggcgggaagcagacacctgtggccaggaccctcccaaaagtgccagcagtaccaagagcaaccacaaagactcttccattcccaagcagagaagagtagaggggaagggctccagaagctcctcggagcacaagggttcttccggagatactgcaaatccttttccagtgccttctttgccaaatggtaactctaaaccagggaagcctcaagtgaagtttgacaaacaacaagcagaccttcacatgagggaggcaaaaaagatgaagcagaaagcagagttaatgacggacagggttggaaaggcttttaagtacctggaagccgtcttgtccttcattgagtgcggaattgccacagagtctgaaagccagtcatccaagtcagcttactctgtctactcagaaactgtagatctcattaaattcataatgtcattaaaatccttctcagatgccacagcgccaacacaagagaaaatatttgctgttttatgcatgcgttgccagtccattttgaacatggcgatgtttcgttgtaaaaaagacatagcaataaagtattctcgtactcttaataaacacttcgagagttcttccaaagtcgcccaggcaccttctccatgcattgcaagcacaggcacaccatcccctctttccccaatgccttctcctgccagctccgtagggtcccagtcaagtgctggcagtgtggggagcagtggggtggctgccactatcagcaccccagtcaccatccagaatatgacatcttcctatgtcaccatcacatcccatgttcttaccgcctttgacctttgggaacaggccgaggccctcacgaggaagaataaagaattctttgctcggctcagcacaaatgtgtgcaccttggccctcaacagcagtttggtggacctggtgcactatacacgacagggttttcagcagctacaagaattaaccaaaacaccttaatggagccccaggttgattcaatgccttgggaactatttttgcacattggaagcctcaaaaacagtccagacgtttgtttcatcaggacaccaaactctaaaaaagaagcaccacgagatggccaggacatttgtccacttaaactctcaacaacagtgtgatcattggttggacactgtggttatgcagaagcagagatgaggaggctggccccagagatgatcttgcccttcctaactaaaggacagaagtgcaatttagcttaaatgggtgtatgaatggtctagaaacatttctattttttttttaaaccagcaggatacaagttgcaaatgaaatgaggagaaacagtttcaactctgaaagtgaatttcacgtcatctcagtagccacgctagtccattcccagaaggaaatttttttttttaacaatgacttttggtaaagggttttgtggatgattttttttcttttgagttttgggagaaatatttgtttagtaacttctaatggccatctgtaaaccataagtaatgaaggactccactgtgccccactttctgccaatgaacagtggcttgataataccaagtattgttgtaatttataaaattgaaggcaacccccgctcctgccgcccccaatctccccattgcctagagcgctgcacattgaccccagctctgacttctcattactgtgctgaaagtcagcccacgtcggagcggtgaggaggagccacagcacatggggtgccacctcgaggtctgcacaggaggacttggcgctgccatttcctacccctgccatttcccacccctgcttcagcgaaagggactctctaacagggcagtcactgttgactctattctgaatttcctcccttggggaagaagggaaccaacatttatacctgaccagatggctaaagtgcttttaaagttttgtttaagtagagctggaatttgaggtgctgatctgtggtctacagttatgtggtaactcatgttgtccagccaactcagagtttcgtcagtgaacaagaaacatgaaatctgcttcttagagaggctatatttttctgctacaaatattttatatttatagcaaaactagactttcagagtccttgattgtctaggggaagttaactccctgagaggatgtagagatttggggtggttgattagacttttgaaaaactcatcaccacatgccttcactccagagtgttctcagctagatttgatttggttgaggaggaactgtggccctccgtaagttattgccatagtgtatgcattaaaccaagtccattttgaatgacctaaaatgaagtaacacaatcagaaatcccatgtgcccataagcacagatttttctttttcattgaaactttaaaggttattattggaaacattactttgagtgcagtgtttttaaaagccaattcttttttatcccttttagaagtagaatttgcacacttactacaattgaggagtgtcatctctataactttttctccgcctttgtcccattctgcccctgtacatgtttcctaccaagcatgtttcacattttcctattagtggaggagggagaaccatatttatttataatgaagacatctaagatccctatgatgaatgcaggaactctcttggtagtttgtaaatacacaaagggatgtgtcgagggatgggagcgatgcttatctctcacagtgtgagtggtctgtgtgaggctgttccttcagtttcttctccagactgttctttggttgtcactaagtcagaggtctggtccctcatgtttaggtgaaagccagagaatgacagctgtagtcatatctgagcataagaccttgatgtgtgattcctgatgaccggtttcatttattcatgttataaagcaaagccctggtcctttttaaactactagttttaaaaacctgtgttaaatgaacagtaattgcctggtaggtttggtgtgtgtgtagcattgtgtgtccatctgttatatgtaaaggacaaggcaccagaatcaggctttatttcgatattgaagatgttatttaacatctttcttttttccttactcccttagccatcccctccccttttgtcctatcattccctagaacaagccacctgtcaattgtgaagggttgtgttctttatggcaggttctatgcagattgtgccagagcatgtgcgtgttctgttggcaagccacagtgctcccttgactgaagacatttccaggtagatttctcagccagctctaaaacagattgctttttcagtggccttactctttgtgggtttttttttttttctctgaacttgatataaagattttatttgtcccttgaaaaagtaacaaatgtgcatagatcaatttgtactactttggtcattggatatttctgatccttattgcattgtacctaaaggagagtaactaatggtaacctttttaatagagtatgtgaaaggtagtggctgatgaatccttaacgttcatagggtctttttgctgttacggttgtatatagaggtctgaaggatttttaaaatgatttgcactttttcactgcatgcttacaattcccaaaggcaaaatctgtactgaggtagatcatttgaaagggctagattataaaattaagccttagagtatggaaagttcttataacaataatagtacacacttcagagtaagacaaatgcaaagcatcttaaggagtgaaaatagagtgtaaatcttgcctttggcactacaaggtgtgtgtgtgtgtgtgtgtgtgtgtgtgtgtctttagtaggaaatggaagaacactgttttattttttaaagtgtttaatgtttctgtcctttctgtgaattattgaatttaagagccctgctaaataatgaaaaaacactttactaaaatttatcaaattatactgggttcggattgtgaaaacattggccacctagtagcagtggtgaggagtgggagggcccagcaagcatttatcagaaatagaatcacaataggaggagaatttgactgtctgatattatgatttgattacaatactgaatgggaaaagtatctaatattttgtaacaaaaagaccttcatattatctgttttgaccaaaatatgtagctatttcccttacacagattggaccgcacttatctcccttgtcctgtatcctttaatttcaggtctcaggatgtttagaaagctaaaaccccctacccctttctggctgaaaacttgccttatttggtatcttacacattaatgttactagcatcaggagcttactgttttattatgattcatcttcagtaatttttagaagcaagaagaaagccattgtgtcctctacaattaacaaaacttatctctgatatacaaagggatataaatatatacacttaaatagagaaaaagaggttgattgaattgtgcctttgagtgaacccagtttttaaataccgctgtgtttgtttcgccatggcttcagggatgctacatggctcttgcaccttttactcctctgctttatgaagtttgagttgtatttgtgcatcttaaagtaggttgaggcttgaggctgggctttcgggtttttttgttttttgttttgttttgttttgttttgttttcttgtacttaaacctgcttgcttcctaccacagattctttattttcccaaacactacaaaaaaacttttaaaactttgccatttcatctgtttacactctttgccactgattagcagtatttaaatcttgcaagaatattttgtgctttctttagaaacacaagagtatagatttttctcactgaaaagtgagagttacgcattgcagccatgaagggatgctaggatcaattatggcagtaccttttttcccctcctgttcttgagccagttgtctcttttgttttgggtcccacttaggattaatggatgtaaggtattttcctgtgcctttattttgtgtcattctattggaaggaggtgtaacggcagaatagcatcgtgttgggggttttccttcaaacactgcaagtgatattgccaccatgtgaacctcaaatatgcaatccagttgtgttggtttctcggtgacttggagtgttcatctcttcatgaattgtgagcactgaccatgttcttcagttcttaattatggtgagttgacaaataccaactactgcttttctttaggtggctataaatttcttactgtcaggaggaaatgacattatattctgttccactgaacgtcagagatcagcaggcactgtactgggtagagaagtgcctatacttctctacctaagagggcaggagggaaaccctacagctccttgtgagcctatatattagtatatcggcctggagaggacaagggaataagaccactcatagtgaggctggccaagctgcactggtcggaccaggcagtggctgacctaaggaagacaacttgctttgcttaaaagtagattttttaagcaatgcttaacacaggcagcattcacctttgttcaggccatcgacatgtattgttaaaattactgcatatccccctcagatatcaagtatacactgttcatgttggggttgtgtgtgtgtatgtgtgtatgtacgcacgcatgtgtcccaaatcttgttttaattttttttttctgaatgtgatcatgttttggatgatacctgagcagggttgccttttttttatttattaccattatatattatattatattatattatatattttttgctttcttataactttggaggaaagtcaaatcttggtattattaaaattgttttaaaaaggagtaaattttccagttgataaatgaaaatcactggcctatgtttaataagtttttctttaattactgtggaataacgtgccagctatcatcaacacaatgattttgtacatagggtagggaagcagtgatgctctcaatgggaagatgtgcaacacaaattaaggggaactccatgtattttacctacttcagcaatggaactgcaacttggggctttgtgaataaaatttagctgccttgtatagtcgtttgaaagaatatgtgatctgtgagagaattatagtttttttttagaagaaaaatctgcaaaagatctttccaaagacaatgtgccacagatcttttgttctctgtaatgaggattaattgctgtttaaacaaaaatgtaattgttcatctttaaattctttccttttcataagaggatcaagctgtaaaaaaacaaaaaaattaataaaaatttcgagaaatcattggggttgaatccaaaaaaaaaaaaaaaaaaa

SEQ ID NO: 186 - DNA, 396 bp, Homo sapiens
accaagccttccacgtgcgccttatagcctctcaacttcttgcttgggatctccaacctcaccgcggctcgaaatggaccccaactgctcctgcgccactggtggctcctgcacctgcactggctcctgcaaatgcaaagagtgcaaatgcacctcctgcaagaagagctgctgctcctgctgccccatgagctgtgccaagtgtgcccagggctgcatctgcaaaggggcatcagagaagtgcagctgctgtgcctgatgtccggacagccctgctcgaagatatagaaagagtgacctgcacaaacttggaattttttttccatacaaccctgacccatttactgtattttttttaatgaaatatgtgaatgataataaaagttgctgacttaa

SEQ ID NO: 187 - DNA, 1705 bp, Homo sapiens
attgcgccgcggcacggcctagcgagtggttcttctgcgctactgctgcgcgaatcggcgaccccagtgcctcgaccactatgccgcgctctttcctcgtcaggaagccctccgaccccaatcggaagcctaactacagcgagctgcaggactctaatccagagtttaccttccagcagccctacgaccaggcccacctgctggcagccatcccacctccggagatcctcaaccccaccgcctcgctgccaatgctcatctgggactctgtcctggcgccccaagcccagccaattgcctgggcctcccttcggctccaggagagtcccagggtggcagagctgacctccctgtcagatgaggacagtgggaaaggctcccagccccccagcccaccctcaccggctccttcgtccttctcctctacttcagtctcttccttggaggccgaggcctatgctgccttcccaggcttgggccaagtgcccaagcagctggcccagctctctgaggccaaggatctccaggctcgaaaggccttcaactgcaaatactgcaacaaggaatacctcagcctgggtgccctcaagatgcacatccgaagccacacgctgccctgcgtctgcggaacctgcgggaaggccttctctaggccctggctgctacaaggccatgtccggacccacactggcgagaagcccttctcctgtccccactgcagccgtgccttcgctgaccgctccaacctgcgggcccacctccagacccactcagatgtcaagaagtaccagtgccaggcgtgtgctcggaccttctcccgaatgtccctgctccacaagcaccaagagtccggctgctcaggatgtccccgctgaccctcgaggctccctcttcctctccatacctgcccctgcctgacagccttccccagctccagcaggaaggaccccacatccttctcactgccatggaattccctcctgagtgccccacttctggccacatcagccccacaggactttgatgaagaccattttctggttctgtgtcctctgcctgggctctggaagaggccttcccatggccatttctgtggagggagggcagctggcccccagccctgggggattcctgagctggcctgtctgcgtgggtttttgtatccagagctgtttggatacagctgctttgagctacaggacaaaggctgacagactcactgggaagctcccaccccactcaggggaccccactcccctcacacacacccccccacaaggaaccctcaggccaccctccacgaggtgtgactaactatgcaataatccacccccaggtgcagccccagggcctgcggaggcggtggcagactagagtctgagatgccccgagcccaggcagctatttcagcctcctgtttggtggggtggcacctgtttcccgggcaatttaacaatgtctgaaaagggactgtgagtaatggctgtcacttgtcgggggcccaagtggggtgctctggtctgaccgatgtgtctcccagaactattctgggggcccgacaggtgggcctgggaggaagatgtttacatttttaaaggtacactggtatttatatttcaaacattttgtatcaaggaaacgttttgtatagttatatgtacagtttattgatattcaataaagcagttaatttatatattaaaaa

SEQ ID NO: 188 - DNA, 909 bp, Homo sapiens
agtcggtcggcggcggcagcggaggaggaggaggaggaggaggatgaggaggatgaggaggatgtgggccacgcaggggctggcggtggcgctggctctgagcgtgctgccgggcagccgggcgctgcggccgggcgactgcgaagtttgtatttcttatctgggaagattttaccaggacctcaaagacagagatgtcacattctcaccagccactattgaaaacgaacttataaagttctgccgggaagcaagaggcaaagagaatcggttgtgctactatatcggggccacagatgatgcagccaccaaaatcatcaatgaggtatcaaagcctctggcccaccacatccctgtggagaagatctgtgagaagcttaagaagaaggacagccagatatgtgagcttaagtatgacaagcagatcgacctgagcacagtggacctgaagaagctccgagttaaagagctgaagaagattctggatgactggggggagacatgcaaaggctgtgcagaaaagtctgactacatccggaagataaatgaactgatgcctaaatatgcccccaaggcagccagtgcacggaccgatttgtagtctgctcaatctctgttgcacctgagggggaaaaaacagttcaactgcttactcccaaaacagcctttttgtaatttattttttaagtgggctcctgacaatactgtatcagatgtgaagcctggagctttcctgatgatgctggccctacagtacccccatgaggggattcccttccttctgttgctggtgtactctaggacttcaaagtgtgtctgggatttttttattaaagaaaaaaaatttctagctgtccttgcagaattatagtgaataccaaaatggggttttgccccaggaggctccta

SEQ ID NO: 189 - DNA, 2888 bp, Homo sapiens
atttgtggagaccagccctctggcttggtgagtgaatctggtttacaccggctcctgccctgccttcactcttctcccctgattcaagactcctctgctttggactgaagcactgcaggagtttgtgaccaagaacttcaagagtcaagacagaaggaagccaagggagcagtgcaatggatttctcagtaaaggtagacatagagaaggaggtgacctgccccatctgcctggagctcctgacagaacctctgagcctagattgtggccacagcttctgccaagcctgcatcactgcaaagatcaaggagtcagtgatcatctcaagaggggaaagcagctgtcctgtgtgtcagaccagattccagcctgggaacctccgacctaatcggcatctggccaacatagttgagagagtcaaagaggtcaagatgagcccacaggaggggcagaagagagatgtctgtgagcaccatggaaaaaaactccagatcttctgtaaggaggatggaaaagtcatttgctgggtttgtgaactgtctcaggaacaccaaggtcaccaaacattccgcataaacgaggtggtcaaggaatgtcaggaaaagctgcaggtagccctgcagaggctgataaaggaggatcaagaggctgagaagctggaagatgacatcagacaagagagaaccgcctggaagaattatatccagatcgagagacagaagattctgaaagggttcaatgaaatgagagtcatcttggacaatgaggagcagagagagctgcaaaagctggaggaaggtgaggtgaatgtgctggataacctggcagcagctacagaccagctggtccagcagaggcaggatgccagcacgctcatctcagatctccagcggaggttgaggggatcgtcagtagagatgctgcaggatgtgattgacgtcatgaaaaggagtgaaagctggacattgaagaagccaaaatctgtttccaagaaactaaagagtgtattccgagtaccagatctgagtgggatgctgcaagttcttaaagagctgacagatgtccagtactactgggtggacgtgatgctgaatccaggcagtgccacttcgaatgttgctatttctgtggatcagagacaagtgaaaactgtacgcacctgcacatttaagaattcaaatccatgtgatttttctgcttttggtgtcttcggctgccaatatttctcttcggggaaatattactgggaagtagatgtgtctggaaagattgcctggatcctgggcgtacacagtaaaataagtagtctgaataaaaggaagagctctgggtttgcttttgatccaagtgtaaattattcaaaagtttactccagatatagacctcaatatggctactgggttataggattacagaatacatgtgaatataatgcttttgaggactcctcctcttctgatcccaaggttttgactctctttatggctgtgcctccctgtcgtattggggttttcctagactatgaggcaggcattgtctcatttttcaatgtcacaaaccacggagcactcatctacaagttctctggatgtcgcttttctcgacctgcttatccgtatttcaatccttggaactgcctagtccccatgactgtgtgcccaccgagctcctgagtgttctcattcctttacccacttctgcatagtagcccttgtgctgagactcagattctgcacctgagttcatctctactgagaccatctcttcctttctttccccttcttttacttagaatgtctttgtattcatttgctagggcttccatagcaaagcatcatagattgctgatttaaactgtaattgtattgccgtactgtgggctggaaatcccaaatctagattccagcagagttggttctttctgaggtctgcaaggaagggctctgttccatgcctctctccttggcttgtagaaggcatcttgtccctatgactcttcacattgtctttatgtacatctctgtgcccaagttttccctttttattaagacaccagtcatactggctcagggcccaccgctaatgccttaatgaaatcattttaacattatattctctacaaagaccttatttccaaataagataatatttggaggtattgggaataaaaactccaacatataaatttgaggaaggcacgatttcactcataacaatcttaccctttcttgcaagagatgcttgtacattattttcctaataccttggtttcactagtagtaaacattattattttttttatatttgcaaaggaaacatatctaatccttcctatagaaagaacagtattgctgtaattccttttcttttcttcctcatttcctctgccccttaaaagattgaagaaagagaaacttgtcaactcatatccacgttatctagcaaagtacataagaatctatcactaagtaatgtatccttcagaatgtgttggtttaccagtgacaccccatattcatcacaaaattaaagcaagaagtccatagtaatttatttgctaatagtggatttttaatgctcagagtttctgaggtcaaattttatcttttcacttacaagctctatgatcttaaataatttacttaatgtattttggtgtattttcctcaaattaatattggtgttcaagactatatctaattcctctgatcactttgagaaacaaacttttattaaatgtaaggcacttttctatgaattttaaatataaaaataaatattgttctgattattactgaaaagatgtcagccatttcaatgtcttgggaaacaattttttgtttttgttctgttttctttttgcttcaataaaacaatagctggctcta

SEQ ID NO: 190 - DNA, 1626 bp, Homo sapiens
ggagagatcagccgcccagccaggagttaagctgaggtcgtctgagccctgcgacagcctggacagcaactcaggatggcatcaggcagggcacgctgcacccgaaaactccggaactgggtggtggagcaagtggagagtgggcagtttcccggagtgtgctgggatgatacagctaagaccatgttccggattccctggaaacatgcaggcaagcaggacttccgggaggaccaggatgctgccttcttcaaggcctgggcaatatttaagggaaagtataaggagggggacacaggaggtccagctgtctggaagactcgcctgcgctgtgcactcaacaagagttctgaatttaaggaggttcctgagaggggccgcatggatgttgctgagccctacaaggtgtatcagttgctgccaccaggaatcgtctctggccagccagggactcagaaagtaccatcaaagcgacagcacagttctgtgtcctctgagaggaaggaggaagaggatgccatgcagaactgcacactcagtccctctgtgctccaggactccctcaataatgaggaggagggggccagtgggggagcagtccattcagacattgggagcagcagcagcagcagcagccctgagccacaggaagttacagacacaactgaggccccctttcaaggggatcagaggtccctggagtttctgcttcctccagagccagactactcactgctgctcaccttcatctacaacgggcgcgtggtgggcgaggcccaggtgcaaagcctggattgccgccttgtggctgagccctcaggctctgagagcagcatggagcaggtgctgttccccaagcctggcccactggagcccacgcagcgcctgctgagccagcttgagaggggcatcctagtggccagcaacccccgaggcctcttcgtgcagcgcctttgccccatccccatctcctggaatgcaccccaggctccacctgggccaggcccgcatctgctgcccagcaacgagtgcgtggagctcttcagaaccgcctacttctgcagagacttggtcaggtactttcagggcctgggccccccaccgaagttccaggtaacactgaatttctgggaagagagccatggctccagccatactccacagaatcttatcacagtgaagatggagcaggcctttgcccgatacttgctggagcagactccagagcagcaggcagccattctgtccctggtgtagagcctgggggacccatcttccacctcacctctttgttcttcctgtctcctttgaagtagactcattcttcacacgattgacctgtcctctttgtgataattctcagtagttgtccgtgataatcgtgtcctgaaaatcctcgcacacactggctggtggagaactcaaggctaattttttatccttttttttttttaattttgagatatacgccctctttcatctgtaagggactaggaaattccaaatggtgtgaacccagggggcctttccctcttccctgacctcccaactctaaagccaagcactttatattttcctcttagatattcactaaggacttaaaataaaattttattgaaagaggaa

SEQ ID NO: 191 - DNA, 4503 bp, Homo sapiens
agttcccgttccgggcccgcgaggcagccgccccggtcctgcccctccctcgcgctactgcgggagcagcgtcctcccgggccacggcgcttcccggccccggcgtccccggaccatggcgctctccgggctcttctctagctctcagcggctgcgaagtctgtaaacctggtggccaagtgattgtaagtcaggagactttccttcggtttctgcctttgatggcaagaggtggagattgtggcggcgattacagaaaacatctgggaagacaagttgctgtttttatgggaatcgcaggcttggaagagacagaagcaattccagaaataaattggaaattgaagatttaaacaatgttgttttaaaatattctaacttcaaagaatgatgccagaaacttaaaaaggggctgcgcagagtagcaggggccctggagggcgcggcctgaatcctgattgcccttctgctgagaggacacacgcagctgaagatgaatttgggaaaagtagccgcttgctactttaactatggaagagcagggccacagtgagatggaaataatcccatcagagtctcacccccacattcaattactgaaaagcaatcgggaacttctggtcactcacatccgcaatactcagtgtctggtggacaacttgctgaagaatgactacttctcggccgaagatgcggagattgtgtgtgcctgccccacccagcctgacaaggtccgcaaaattctggacctggtacagagcaagggcgaggaggtgtccgagttcttcctctacttgctccagcaactcgcagatgcctacgtggacctcaggccttggctgctggagatcggcttctccccttccctgctcactcagagcaaagtcgtggtcaacactgacccagtgagcaggtatacccagcagctgcgacaccatctgggccgtgactccaagttcgtgctgtgctatgcccagaaggaggagctgctgctggaggagatctacatggacaccatcatggagctggttggcttcagcaatgagagcctgggcagcctgaacagcctggcctgcctcctggaccacaccaccggcatcctcaatgagcagggtgagaccatcttcatcctgggtgatgctggggtgggcaagtccatgctgctacagcggctgcagagcctctgggccacgggccggctagacgcaggggtcaaattcttcttccactttcgctgccgcatgttcagctgcttcaaggaaagtgacaggctgtgtctgcaggacctgctcttcaagcactactgctacccagagcgggaccccgaggaggtgtttgccttcctgctgcgcttcccccacgtggccctcttcaccttcgatggcctggacgagctgcactcggacttggacctgagccgcgtgcctgacagctcctgcccctgggagcctgcccaccccctggtcttgctggccaacctgctcagtgggaagctgctcaagggggctagcaagctgctcacagcccgcacaggcatcgaggtcccgcgccagttcctgcggaagaaggtgcttctccggggcttctcccccagccacctgcgcgcctatgccaggaggatgttccccgagcgggccctgcaggaccgcctgctgagccagctggaggccaaccccaacctctgcagcctgtgctctgtgcccctcttctgctggatcatcttccggtgcttccagcacttccgtgctgcctttgaaggctcaccacagctgcccgactgcacgatgaccctgacagatgtcttcctcctggtcactgaggtccatctgaacaggatgcagcccagcagcctggtgcagcggaacacacgcagcccagtggagaccctccacgccggccgggacactctgtgctcgctggggcaggtggcccaccggggcatggagaagagcctctttgtcttcacccaggaggaggtgcaggcctccgggctgcaggagagagacatgcagctgggcttcctgcgggctttgccggagctgggccccgggggtgaccagcagtcctatgagtttttccacctcaccctccaggccttctttacagccttcttcctcgtgctggacgacagggtgggcactcaggagctgctcaggttcttccaggagtggatgccccctgcgggggcagcgaccacgtcctgctatcctcccttcctcccgttccagtgcctgcagggcagtggtccggcgcgggaagacctcttcaagaacaaggatcacttccagttcaccaacctcttcctgtgcgggctgttgtccaaagccaaacagaaactcctgcggcatctggtgcccgcggcagccctgaggagaaagcgcaaggccctgtgggcacacctgttttccagcctgcggggctacctgaagagcctgccccgcgttcaggtcgaaagcttcaaccaggtgcaggccatgcccacgttcatctggatgctgcgctgcatctacgagacacagagccagaaggtggggcagctggcggccaggggcatctgcgccaactacctcaagctgacctactgcaacgcctgctcggccgactgcagcgccctctccttcgtcctgcatcacttccccaagcggctggccctagacctagacaacaacaatctcaacgactacggcgtgcgggagctgcagccctgcttcagccgcctcactgttctcagactcagcgtaaaccagatcactgacggtggggtaaaggtgctaagcgaagagctgaccaaatacaaaattgtgacctatttgggtttatacaacaaccagatcaccgatgtcggagccaggtacgtcaccaaaatcctggatgaatgcaaaggcctcacgcatcttaaactgggaaaaaacaaaataacaagtgaaggagggaagtatctcgccctggctgtgaagaacagcaaatcaatctctgaggttgggatgtggggcaatcaagttggggatgaaggagcaaaagccttcgcagaggctctgcggaaccaccccagcttgaccaccctgagtcttgcgtccaacggcatctccacagaaggaggaaagagccttgcgagggccctgcagcagaacacgtctctagaaatactgtggctgacccaaaatgaactcaacgatgaagtggcagagagtttggcagaaatgttgaaagtcaaccagacgttaaagcatttatggcttatccagaatcagatcacagctaaggggactgcccagctggcagatgcgttacagagcaacactggcataacagagatttgcctaaatggaaacctgataaaaccagaggaggccaaagtctatgaagatgagaagcggattatctgtttctgagaggatgctttcctgttcatggggtttttgccctggagcctcagcagcaaatgccactctgggcagtcttttgtgtcagtgtcttaaaggggcctgcgcaggcgggactatcaggagtccactgcctccatgatgcaagccagcttcctgtgcagaaggtctggtcggcaaactccctaagtacccgctacaattctgcagaaaaagaatgtgtcttgcgagctgttgtagttacagtaaatacactgtgaagagactttattgcctattataattatttttatctgaagctagaggaataaagctgtgagcaaacagaggaggccagcctcacctcattccaacacctgccatagggaccaacgggagcgagttggtcaccgctcttttcattgaagagttgaggatgtggcacaaagttggtgccaagcttcttgaataaaacgtgtttgatggattagtattatacctgaaatattttcttccttctcagcactttcccatgtattgatactggtcccacttcacagctggagacaccggagtatgtgcagtgtgggatttgactcctccaaggttttgtggaaagttaatgtcaaggaaaggatgcaccacgggcttttaattttaatcctggagtctcactgtctgctggcaaagatagagaatgccctcagctcttagctggtctaagaatgacgatgccttcaaaatgctgcttccactcagggcttctcctctgctaggctaccctcctctagaaggctgagtaccatgggctacagtgtctggccttgggaagaagtgattctgtccctccaaagaaatagggcatggcttgcccctgtggccctggcatccaaatggctgcttttgtctcccttacctcgtgaagaggggaagtctcttcctgcctcccaagcagctgaagggtgactaaacgggcgccaagactcaggggatcggctgggaactgggccagcagagcatgttggacaccccccaccatggtgggcttgtggtggctgctccatgagggtgggggtgatactactagatcacttgtcctcttgccagctcatttgttaataaaatactgaaaacactctta

SEQ ID NO: 192 - DNA, 2012 bp, Homo sapiens
agtgtttaaccaaccatctgttctaaaagaagggctgaactgatggaaggaatgctgttagcctgagactcaggaagacaacttctgcagggtcactccctggcttctggaggaaagagaaggagggcagtgctccagtggtacagaagtgagacataatggaatcaggcttcacctccaaggacacctatctaagccattttaaccctcgggattacctagaaaaatattacaagtttggttctaggcactctgcagaaagccagattcttaagcaccttctgaaaaatcttttcaagatattctgcctagacggtgtgaagggagacctgctgattgacatcggctctggccccactatctatcagctcctctctgcttgtgaatcctttaaggagatcgtcgtcactgactactcagaccagaacctgcaggagctggagaagtggctgaagaaagagccagaggcctttgactggtccccagtggtgacctatgtgtgtgatcttgaagggaacagagtcaagggtccagagaaggaggagaagttgagacaggcggtcaagcaggtgctgaagtgtgatgtgactcagagccagccactgggggccgtccccttacccccggctgactgcgtgctcagcacactgtgtctggatgccgcctgcccagacctccccacctactgcagggcgctcaggaacctcggcagcctactgaagccagggggcttcctggtgatcatggatgcgctcaagagcagctactacatgattggtgagcagaagttctccagcctccccctgggccgggaggcagtagaggctgctgtgaaagaggctggctacacaatcgaatggtttgaggtgatctcgcaaagttattcttccaccatggccaacaacgaaggacttttctccctggtggcgaggaagctgagcagacccctgtgatgcctgtgacctcaattaaagcaattcctttgacctgtccagttgactttagtccttgtttctaactgccaagtcatgtgctgagtagaggctcagtggttggggcccaatggttcatctaggacgggactagagaggtcagtctacaagcaatccattgaccacttacttggtgctgcacacaaatgttggtgctatgggacccaaagatgagcaattagtattccagtcttcattgcctgtgcttacaaaagaagacctcacttccctaaacatctagttatggcggctcaagcccgtacctgcctacagagaagtgtctgcagttactcactattagtttcctaagggggcactgctggctccttctctcccaggaatgggcttctcctattctttaactcttgccttctccctggagaggctaccaaaccctggcctctgccgctgttcaggctgccatgtgggtatagctgtttgctagactccactctggcctcaggggccagagaacagctgtccagcatttctgttcatcccagcaatccaaaaaaaaatttttttaagctacaaagatcactccattttcaaattcagactctgccacttattagctgtttctcattaggcaagttatataaccttgcagtgcctcactttcctcatctataaaatgagattaaaatagtctttttattaagagaattaaagtgaattgtggccaggcactgtggctcatgcctgtaatcccagcgctttgggaggctgaggcagacagattgcttgagctcagaagttcgagactggcctggggaacatgcaaaaaccctgtctgtattaaaaatacaaaaaaattagctaggtgtggcggcatatgcctgtggtcccagctactcaggaggctgaagtgggaggatggcttgagcccgggaggcggaggttgcaatgaactgagatcgcaccactgtgttccagacagagtgcgatgctgtctcgaaaaaagtaaaataataaataaataataaataaaataaaataaagtgaattgttacatgtaaa

SEQ ID NO: 193 - DNA, 6599 bp, Homo sapiens
agaaatccgaaggccgcgccagagccctgcttccccttgcacctgcgccgggcggccatggacttgtacagcaccccggccgctgcgctggacaggttcgtggccagaaggctgcagccgcggaaggagttcgtagagaaggcgcggcgcgctctgggcgccctggccgctgccctgagggagcgcgggggccgcctcggtgctgctgccccgcgggtgctgaaaactgtcaagggaggctcctcgggccggggcacagctctcaagggtggctgtgattctgaacttgtcatcttcctcgactgcttcaagagctatgtggaccagagggcccgccgtgcagagatcctcagtgagatgcgggcatcgctggaatcctggtggcagaacccagtccctggtctgagactcacgtttcctgagcagagcgtgcctggggccctgcagttccgcctgacatccgtagatcttgaggactggatggatgttagcctggtgcctgccttcaatgtcctgggtcaggccggctccggcgtcaaacccaagccacaagtctactctaccctcctcaacagtggctgccaagggggcgagcatgcggcctgcttcacagagctgcggaggaactttgtgaacattcgcccagccaagttgaagaacctaatcttgctggtgaagcactggtaccaccaggtgtgcctacaggggttgtggaaggagacgctgcccccggtctatgccctggaattgctgaccatcttcgcctgggagcagggctgtaagaaggatgctttcagcctagccgaaggcctccgaactgtcctgggcctgatccaacagcatcagcacctgtgtgttttctggactgtcaactatggcttcgaggaccctgcagttgggcagttcttgcagcggcagcttaagagacccaggcctgtgatcctggacccagctgaccccacatgggacctggggaatggggcagcctggcactgggatttgctagcccaggaggcagcatcctgctatgaccacccatgctttctgagggggatgggggacccagtgcagtcttggaaggggccgggccttccacgtgctggatgctcaggtttgggccaccccatccagctagaccctaaccagaagacccctgaaaacagcaagagcctcaatgctgtgtacccaagagcagggagcaaacctccctcatgcccagctcctggccccactggggcagccagcatcgtcccctctgtgccgggaatggccttggacctgtctcagatccccaccaaggagctggaccgcttcatccaggaccacctgaagccgagcccccagttccaggagcaggtgaaaaaggccattgacatcatcttgcgctgcctccatgagaactgtgttcacaaggcctcaagagtcagtaaagggggctcatttggccggggcacagacctaagggatggctgtgatgttgaactcatcatcttcctcaactgcttcacggactacaaggaccaggggccccgccgcgcagagatccttgatgagatgcgagcgcagctagaatcctggtggcaggaccaggtgcccagcctgagccttcagtttcctgagcagaatgtgcctgaggctctgcagttccagctggtgtccacagccctgaagagctggacggatgttagcctgctgcctgccttcgatgctgtggggcagctcagttctggcaccaaaccaaatccccaggtctactcgaggctcctcaccagtggctgccaggagggcgagcataaggcctgcttcgcagagctgcggaggaacttcatgaacattcgccctgtcaagctgaagaacctgattctgctggtgaagcactggtaccgccaggttgcggctcagaacaaaggaaaaggaccagcccctgcctctctgcccccagcctatgccctggagctcctcaccatctttgcctgggagcagggctgcaggcaggattgtttcaacatggcccaaggcttccggacggtgctggggctcgtgcaacagcatcagcagctctgtgtctactggacggtcaactatagcactgaggacccagccatgagaatgcaccttcttggccagcttcgaaaacccagacccctggtcctggaccccgctgatcccacctggaacgtgggccacggtagctgggagctgttggcccaggaagcagcagcgctggggatgcaggcctgctttctgagtagagacgggacatctgtgcagccctgggatgtgatgccagccctcctttaccaaaccccagctggggaccttgacaagttcatcagtgaatttctccagcccaaccgccagttcctggcccaggtgaacaaggccgttgataccatctgttcatttttgaaggaaaactgcttccggaattctcccatcaaagtgatcaaggtggtcaagggtggctcttcagccaaaggcacagctctgcgaggccgctcagatgccgacctcgtggtgttcctcagctgcttcagccagttcactgagcagggcaacaagcgggccgagatcatctccgagatccgagcccagctggaggcatgtcaacaggagcggcagttcgaggtcaagtttgaagtctccaaatgggagaatccccgcgtgctgagcttctcactgacatcccagacgatgctggaccagagtgtggactttgatgtgctgccagcctttgacgccctaggccagctggtctctggctccaggcccagctctcaagtctacgtcgacctcatccacagctacagcaatgcgggcgagtactccacctgcttcacagagctacaacgggacttcatcatctctcgccctaccaagctgaagagcctgatccggctggtgaagcactggtaccagcagtgtaccaagatctccaaggggagaggctccctacccccacagcacgggctggaactcctgactgtgtatgcctgggagcagggcgggaaggactcccagttcaacatggctgagggcttccgcacggtcctggagctggtcacccagtaccgccagctctgtatctactggaccatcaactacaacgccaaggacaagactgttggagacttcctgaaacagcagcttcagaagcccaggcctatcatcctggatccggctgacccgacaggcaacctgggccacaatgcccgctgggacctgctggccaaggaagctgcagcctgcacatctgccctgtgctgcatgggacggaatggcatccccatccagccatggccagtgaaggctgctgtgtgaagttgagaaaatcagcggtcctactggatgaagagaagatggacaccagccctcagcatgaggaaattcagggtcccctaccagatgagagagattgtgtacatgtgtgtgtgagcacatgtgtgcatgtgtgtgcacacgtgtgcatgtgtgtgttttagtgaatctgctctcccagctcacacactcccctgcctcccatggcttacacactaggatccagactccatggtttgacaccagcctgcgtttgcagcttctctgtcacttccatgactctatcctcataccaccactgctgcttcccacccagctgagaatgccccctcctccctgactcctctctgcccatgcaaattagctcacatctttcctcctgctgcaatccatcccttcctcccattggcctctccttgccaaatctaaatagtttatatagggatggcagagagttcccatctcatctgtcagccacagtcatttggtactggctacctggagccttatcttctgaagggttttaaagaatggccaattagctgagaagaattatctaatcaattagtgatgtctgccatggatgcagtagaggaaagtggtggtacaagtgccatgattgattagcaatgtctgcactggatacggaaaaaagaaggtgcttgcaggtttacagtgtatatgtgggctattgaagagccctctgagctcggttgctagcaggagagcatgcccatattggcttactttgtctgccacagacacagacagagggagttgggacatgcatgctatggggaccctcttgttggacacctaattggatgcctcttcatgagaggcctccttttcttcaccttttatgctgcactcctcccctagtttacacatcttgatgctgtggctcagtttgccttcctgaatttttattgggtccctgttttctctcctaacatgctgagattctgcatccccacagcctaaactgagccagtggccaaacaaccgtgctcagcctgtttctctctgccctctagagcaaggcccaccaggtccatccaggaggctctcctgacctcaagtccaacaacagtgtccacactagtcaaggttcagcccagaaaacagaaagcactctaggaatcttaggcagaaagggattttatctaaatcactggaaaggctggaggagcagaaggcagaggccaccactggactattggtttcaatattagaccactgtagccgaatcagaggccagagagcagccactgctactgctaatgccaccactacccctgccatcactgccccacatggacaaaactggagtcgagacctaggttagattcctgcaaccacaaacatccatcagggatggccagctgccagagctgcgggaagacggatcccacctccctttcttagcagaatctaaattacagccagacctctggctgcagaggagtctgagacatgtatgattgaatgggtgccaagtgccagggggcggagtccccagcagatgcatcctggccatctgttgcgtggatgagggagtgggtctatctcagaggaaggaacaggaaacaaagaaaggaagccactgaacatcccttctctgctccacaggagtgccttagacagcctgactctccacaaaccactgttaaaacttacctgctaggaatgctagattgaatgggatgggaagagccttccctcattattgtcattcttggagagaggtgagcaaccaagggaagctcctctgattcacctagaacctgttctctgccgtctttggctcagcctacagagactagagtaggtgaagggacagaggacagggcttctaatacctgtgccatattgacagcctccatccctgtcccccatcttggtgctgaaccaacgctaagggcaccttcttagactcacctcatcgatactgcctggtaatccaaagctagaactctcaggaccccaaactccacctcttggattggccctggctgctgccacacacatatccaagagctcagggccagttctggtgggcagcagagacctgctctgccaagttgtccagcagcagagtggccctggcctgggcatcacaagccagtgatgctcctgggaagaccaggtggcaggtcgcagttgggtaccttccattcccaccacacagactctgggcctccccgcaaaatggctccagaattagagtaattatgagatggtgggaaccagagcaactcaggtgcatgatacaaggagaggttgtcatctgggtagggcagagaggagggcttgctcatctgaacaggggtgtatttcattccaggccctcagtctttggcaatggccaccctggtgttggcatattggccccactgtaacttttgggggcttcccggtctagccacaccctcggatggaaagacttgactgcataaagatgtcagttctccctgagttgattgataggcttaatggtcaccctaaaaacacccacatatgcttttcgatggaaccaggtaagttgacgctaaagttcttatggaaaaatacacacgcaatagctaggaaaacacagggaaagaagagttctgagcagggcctagtcttagccaatattaaaacatactatgaagcctctgatacttaaacagcatggcgctggtacgtaaatagaccaatgcagttaggtggctctttccaagactctggggaaaaaagtagtaaaaagctaaatgcaatcaatcagcaattgaaagctaagtgagagagccagagggcctccttggtggtaaaagagggttgcatttcttgcagccagaaggcagagaaagtgaagaccaagtccagaactgaatcctaagaaatgcaggactgcaaagaaattggtgtgtgtgtgtgtgtgtgtgtgtgtgtgtgtgtttaatttttaaaaagtttttattgagatacaagtcaataccataaagctctcacccttctaaagtgtacaattcagtggtgtgagtatattcataagatttatacttggtgtctattcataagacttatatccagcatattcataactagagccatatcacagatgcattcatcataataattccagacattttcatcaccctaaaaggaaaccctgaaacccattagcagtcattccccattcctccaacccattctctccctaatccctagaaaccaccaatctgctgtgtatttcatctattgccaacatttcatataaatggcatcatacaata

SEQ ID NO: 194 - DNA, 1923 bp, Homo sapiens
acttctgccttgttatcagaggagcgaggatgtggcctgtgtgccgcctaatcatgcctagaactgtctgcacctgctgatcttttgcttctgcgaactggctgcacctgctgttctcctgctcataccctagcccgtgcttaccctaattccctgttctcctgcctcaccaccagaggcccgggttgtctgcacagtctcattttccacgttattcctgtaatgaacccgtcctcccacccccaccagcagttacagggctgggtgcggagaccaactctggccagacacagaggagcagcaagaacccggggcaacggtcctgtgaaaaccgaatcctcccgcttcggcgtcccaggagcccgcccctcgcccgccgcctcccctgcgtccccgccccgcgcagccgccgcgctcctgcgctccgaggtccgaggttcccgagatgaaggtctggctgctgcttggtcttctgctggtgcacgaagcgctggaggatgttactggccaacaccttcccaagaacaagcgtccaaaagaaccaggagagaatagaatcaaacctaccaacaagaaggtgaagcccaaaattcctaaaatgaaggacagggactcagccaattcagcaccaaagacgcagtctatcatgatgcaagtgctggataaaggtcgcttccagaaacccgccgctaccctgagtctgctggcggggcaaactgtagagcttcgatgtaaagggagtagaattgggtggagctaccctgcgtatctggacacctttaaggattctcgcctcagcgtcaagcagaatgagcgctacggccagttgactctggtcaactccacctcggcagacacaggtgaattcagctgctgggtgcagctctgcagcggctacatctgcaggaaggacgaggccaaaacgggctccacctacatcttttttacagagaaaggagaactctttgtaccttctcccagctacttcgatgttgtctacttgaacccggacagacaggctgtggttccttgtcgggtgaccgtgctgtcggccaaagtcacgctccacagggaattcccagccaaggagatcccagccaatggaacggacattgtttatgacatgaagcggggctttgtgtatctgcaacctcattccgagcaccagggtgtggtttactgcagggcggaggccgggggcagatctcagatctccgtcaagtaccagctgctctacgtggcggttcccagtggccctccctcaacaaccatcttggcttcttcaaacaaagtgaaaagtggggacgacatcagtgtgctctgcactgtcctgggggagcccgatgtggaggtggagttcacctggatcttcccagggcagaaggatgaaaggcctgtgacgatccaagacacttggaggttgatccacagaggactgggacacaccacgagaatctcccagagtgtcattacagtggaagactttgagacgattgatgcaggatattacatttgcactgctcagaatcttcaaggacagaccacagtagctaccactgttgagttttcctgacttggaaaaggaaatgtaatgaacttatggaaagcccatttgtgtacacagtcagctttggggttccttttattagtgctttgccagaggctgatgtcaagcaccacaccccaaccccagcgtctcgtgagtccgacccagacatccaaactaaaaggaagtcatccagtctattcacagaagtgttaacttttctaacagaaagcatgattttgattgcttacctacatacgtgttcctagtttttatacatgtgtaaacaattttatataatcaatcatttctattaaatgagcacgtttttgtaaaaaataaaaagtgggataagtgttaaaaaaaaaaaaaaaaaa

SEQ ID NO: 195 - DNA, 4502 bp, Homo sapiens
agcaaccggaggcggcggcgcgtctggaggaggctgcagcagcggaagaccccagtccagatccaggactgagatcccagaaccatgaacctggccatcagcatcgctctcctgctaacagtcttgcaggtctcccgagggcagaaggtgaccagcctaacggcctgcctagtggaccagagccttcgtctggactgccgccatgagaataccagcagttcacccatccagtacgagttcagcctgacccgtgagacaaagaagcacgtgctctttggcactgtgggggtgcctgagcacacataccgctcccgaaccaacttcaccagcaaatacaacatgaaggtcctctacttatccgccttcactagcaaggacgagggcacctacacgtgtgcactccaccactctggccattccccacccatctcctcccagaacgtcacagtgctcagagacaaactggtcaagtgtgagggcatcagcctgctggctcagaacacctcgtggctgctgctgctcctgctctccctctccctcctccaggccacggatttcatgtccctgtgactggtggggcccatggaggagacaggaagcctcaagttccagtgcagagatcctacttctctgagtcagctgaccccctccccccaatccctcaaaccttgaggagaagtggggaccccacccctcatcaggagttccagtgctgcatgcgattatctacccacgtccacgcggccacctcaccctctccgcacacctctggctgtctttttgtactttttgttccagagctgcttctgtctggtttatttaggttttatccttccttttctttgagagttcgtgaagagggaagccaggattggggacctgatggagagtgagagcatgtgaggggtagtgggatggtggggtaccagccactggaggggtcatccttgcccatcgggaccagaaacctgggagagacttggatgaggagtggttgggctgtgcctgggcctagcacggacatggtctgtcctgacagcactcctcggcaggcatggctggtgcctgaagaccccagatgtgagggcaccaccaagaatttgtggcctaccttgtgagggagagaactgagcatctccagcattctcagccacaaccaaaaaaaaataaaaagggcagccctccttaccactgtggaagtccctcagaggccttggggcatgacccagtgaagatgcaggtttgaccaggaaagcagcgctagtggagggttggagaaggaggtaaaggatgagggttcatcatccctccctgcctaaggaagctaaaagcatggccctgctgcccctccctgcctccacccacagtggagagggctacaaaggaggacaagaccctctcaggctgtcccaagctcccaagagcttccagagctctgacccacagcctccaagtcaggtggggtggagtcccagagctgcacagggtttggcccaagtttctaagggaggcacttcctcccctcgcccatcagtgccagcccctgctggctggtgcctgagcccctcagacagccccctgccccgcaggcctgccttctcagggacttctgcggggcctgaggcaagccatggagtgagacccaggagccggacacttctcaggaaatggcttttcccaacccccagcccccacccggtggttcttcctgttctgtgactgtgtatagtgccaccacagcttatggcatctcattgaggacaaagaaaactgcacaataaaaccaagcctctggaatctgtcctcgtgtccacctggccttcgctcctccagcagtgcctgcctgcccccgcttcgctggggtctccacgggtgaggctggggaacgccacctcttcctcttccctgacttctccccaaccacttagtagcaacgctaccccaggggctaatgactgcacactgggcttcttttcagaatgaccctaacgagacacatttgcccaaataaacgaacatcccatgtctgctgactcacctggctggaacaacatgcttactgccaacatgtgggccgaaccacatggccctggctctggaatgcacaagtggctttgcgtgaatctgcgctaagctatgcagtctgctttttcttctcagctctggtagttcttcagaaatgtaccctccaggcacatccactattgcgagggtgagcacgaagggtgggagatgcccatgtcctcaaggcatcacttcctaaatccaaaagcatcggcaggagaaaggactggggacaaatactgtcccttcgggagtagggagggaacactgaggcccatccctggctccttccctaaaagtagagtaaaatggaagcgagcatcctgggattgggggcaagagggggaccgcagggtagctgtgggttccaactgctgtcagagtcagagaggcagccccaagccagcctccctgctttgccagggaatttgggggaggaaggtgacagctgcccagaggctgactcatctgatatttagcactgggtaggatgattgtttctgagcatttttcttaaaggcctcagatctaaattatgccaccggctcccactcttgctacctcccgtcaacttctctgccttgccttccacccctgtagttaccatacacagaggaggaggagctgtccttgtcccaggttgggaggctgacaaccccttagcaagatgctgccagcccagagctctccaaggggaggaacacccctgagactcaggcccctctccttcagccctgcttgggctgcaagcgccgtgccaaggaaaggcatcttggtgagaagagctgctgtgggggaagggagatcaaatgccagagaaatgtggggtgccccaccctcaggatagtaaaagagtatggaggtatttctggaaggaaatgagcggcactgtgtgaagcctcgcacctgtgtgacacttcctatggggtctttgtcacactctagtactatgtccctgaagagtttagcagccacactcttagaagggtgctgggagatggtgttgccctctgcagccatgtttaggggagcggaacctgaggcccacagtgggtgagattagctcaagaagccacagaggccaccagagggccacggacttcggaaaggagaagagaagaacagggcatcaggcctcacaacgcaaacctacccagagatgggcacagtggctcatgcctgtaatcccaccactttgggaagaggcggatcgcttgaggtcaggagttcgagactagcctcgaaaccctatctctactaaaaatacaaaaattagccaggcatggtggcctgcgcctgtaatcccagctactcaggaggctgaggcaggagaatcacttgaacccgggaggcggaggttgcagtgagccaagattgcaccactgcactccagcctgggagatagagtgagactccatctcaaaaaaataaaaaataaaataaacctacccggaatgaccatgctgaggactgggagcccgcagactttcagccacaggccgcgacagccgtgggtccctccctggtcaagtcagcaggccttgtggaggctgtggggtatctgtggtgactcaggtaattatagagggctggcccccagccctggttcctgtacacatgccccaaccccatccccatccactccctcgccagtcctaacctctttcctgggtccccccccttcagcacctaagtccatacctagggccgtggaattcccgctcaagagcaacagaagcccctctctgcacccccatttctggactggattgtccactgagacgcgcaatgtctgcatctctgacatctagaggcttcctcgggaagggcatggggatctccgtgagatgtggggactttcactggccaaccaagaaatctacacagcgtccggggacctgtgacacacatccctcccgcctcctcaacctgatgtccctctctgaatctgcagctttcgtgctgtgaaggtgtctttacatgtgaaacaaacaaacccaagtcaagagtaaatcatctcatttactagtgagaaaatgttggagctggagtccttcagagagtcctggccaggcaagagggccatcagctctcttctgctcaacaggggctctcagcctcaggacactctcaggcctggaatgtccccaacacactcaaggagaaacatgtcctgtgcagacccacaggaggcatctttgcccggcacaaggaagagctggggtcagtgggacctgtagatgtagacacatcatatggagggtgggtaggaccaatgtggcagcttcatggaggccaagtgtggctctgcaccaggaaggggctgtgatggctggaggtgcccagcagtgcaggcggggagtgcctggcagtggcgtggccaggtggaggccacctgtcaagtttgcaataaagcagtttcctgaatttggtgagaa

SEQ ID NO: 196 - DNA, 988 bp, Homo sapiens
gcagtcgccacacctttgcccctgctgcgatgaccctgtcgccacttctgctgttcctgccaccgctgctgctgctgctggacgtccccacggcggcggtgcaggcgtcccctctgcaagcgttagacttctttgggaatgggccaccagttaactacaagacaggcaatctatacctgcgggggcccctgaagaagtccaatgcaccgcttgtcaatgtgaccctctactatgaagcactgtgcggtggctgccgagccttcctgatccgggagctcttcccaacatggctgttggtcatggagatcctcaatgtcacgctggtgccctacggaaacgcacaggaacaaaatgtcagtggcaggtgggagttcaagtgccagcatggagaagaggagtgcaaattcaacaaggtggaggcctgcgtgttggatgaacttgacatggagctagccttcctgaccattgtctgcatggaagagtttgaggacatggagagaagtctgccactatgcctgcagctctacgccccagggctgtcgccagacactatcatggagtgtgcaatgggggaccgcggcatgcagctcatgcacgccaacgcccagcggacagatgctctccagccaccacacgagtatgtgccctgggtcaccgtcaatgggaaacccttggaagatcagacccagctccttacccttgtctgccagttgtaccagggcaagaagccggatgtctgcccttcctcaaccagctccctcaggagtgtttgcttcaagtgatggccggtgagctgcggagagctcatggaaggcgagtgggaacccggctgcctgcctttttttctgatccagaccctcggcacctgctacttaccaactggaaaattttatgcatcccatgaagcccagatacacaaaattccaccccatgatcaagaatcctgctccactaagaatggtgctaaagtaaaactagtttaataagc

SEQ ID NO: 197 - DNA, 1682 bp, Homo sapiens
cattttgtgcctgcctagctatccagacagagcagctaccctcagctctagctgatactacagacagtacaacagatcaagaagtatggcagtgacaactcgtttgacatggttgcacgaaaagatcctgcaaaatcattttggagggaagcggcttagccttctctataagggtagtgtccatggattccgtaatggagttttgcttgacagatgttgtaatcaagggcctactctaacagtgatttatagtgaagatcatattattggagcatatgcagaagagagttaccaggaaggaaagtatgcttccatcatcctttttgcacttcaagatactaaaatttcagaatggaaactaggactatgtacaccagaaacactgttttgttgtgatgttacaaaatataactccccaactaatttccagatagatggaagaaatagaaaagtgattatggacttaaagacaatggaaaatcttggacttgctcaaaattgtactatctctattcaggattatgaagtttttcgatgcgaagattcactggatgaaagaaagataaaaggggtcattgagctcaggaagagcttactgtctgccttgagaacttatgaaccatatggatccctggttcaacaaatacgaattctgctgctgggtccaattggagctgggaagtccagctttttcaactcagtgaggtctgttttccaagggcatgtaacgcatcaggctttggtgggcactaatacaactgggatatctgagaagtataggacatactctattagagacgggaaagatggcaaatacctgccgtttattctgtgtgactcactggggctgagtgagaaagaaggcggcctgtgcagggatgacatattctatatcttgaacggtaacattcgtgatagataccagtttaatcccatggaatcaatcaaattaaatcatcatgactacattgattccccatcgctgaaggacagaattcattgtgtggcatttgtatttgatgccagctctattcaatacttctcctctcagatgatagtaaagatcaaaagaattcgaagggagttggtaaacgctggtgtggtacatgtggctttgctcactcatgtggatagcatggatttgattacaaaaggtgaccttatagaaatagagagatgtgagcctgtgaggtccaagctagaggaagtccaaagaaaacttggatttgctctttctgacatctcggtggttagcaattattcctctgagtgggagctggaccctgtaaaggatgttctaattctttctgctctgagacgaatgctatgggctgcagatgacttcttagaggatttgccttttgagcaaatagggaatctaagggaggaaattatcaactgtgcacaaggaaaaaaatagatatgtgaaaggttcacgtaaatttcctcacatcacagaagattaaaattcagaaaggagaaaacacagaccaaagagaagtatctaagaccaaagggatgtgttttattaatgtctaggatgaagaaatgcatagaacattgtagtacttgtaaataactagaaataacatgatttagtcataattgtgaaaaataataataatttttcttggatttatgttctgtatctgtgaaaaaataaatttcttataaaactcggg

SEQ ID NO: 198 - DNA, 738 bp, Homo sapiens
gaggaaactgttgagaaaacggaactactggggaaagggagggctcactgagaaccatcccggtaacccgatcaccgctggtcaccatgaaccacattgtgcaaaccttctctcctgtcaacagcggccagcctcccaactacgagatgctcaaggaggagcaggaagtggctatgctgggggtgccccacaaccctgctcccccgatgtccaccgtgatccacatccgcagcgagacctccgtgcctgaccatgtggtctggtccctgttcaacaccctcttcatgaacacctgctgcctgggcttcatagcattcgcgtactccgtgaagtctagggacaggaagatggttggcgacgtgaccggggcccaggcctatgcctccaccgccaagtgcctgaacatctgggccctgattttgggcatcttcatgaccattctgctcatcatcatcccagtgttggtcgtccaggcccagcgatagatcaggaggcatcattgaggccaggagctctgcccgtgacctgtatcccacgtactctatcttccattcctcgccctgcccccagaggccaggagctctgcccttgacctgtattccacttactccaccttccattcctcgccctgtccccacagccgagtcctgcatcagccctttatcctcacacgcttttctacaatggcattcaataaagtgtatatgtttctggtgctgctgtgacttcaaaaaaaaa

SEQ ID NO: 199 - DNA, 3556 bp, Homo sapiens
actttcactttctcttccgccgaagccgctccccttgcgaagaactggggcctcccgggaggagagagggctttgccttgaaacccgggacgccaggggcgctcccgcaagtgggggtcctccgggacttggaacgccccggctgggtggtgtccgggcgtcctttccccgcttcttcccacctcggctggtcccgtttcctcctgcgcccagtgcggacctgtctcggcgcccgctgccctctcaccgccccacgcaggatcccggcctggtcaccgggcagtgtgatgcttcccgactgccgcggggacagcgaggcacacacagggcttgggccgcgccggaggccacacggcctggctgagttgctcctggtctcccgcctctcccaggcgacccggaggtagcatttcccaggaggcacggtcccccccagggggatgggcacagccacgccagatggacgagaagaccaagaaaggctgtgggtgagcgtggaggatgctcagatgcacaccgtcaccatctggctcacagtgcgccctgatatgacagtggcgtctctcaaggacatggtttttctggactatggcttcccaccagtcttgcagcagtgggtgattgggcagcggctggcacgagaccaggagaccctgcactcccatggggtgcggcagaatggggacagtgcctacctctatctgctgtcagcccgcaacacctccctcaaccctcaggagctgcagcgggagcggcagctgcggatgctggaagatctgggcttcaaggacctcacgctgcagccgcggggccctctggagccaggccccccaaagcccggggtcccccaggaacccggacgggggcagccagatgcagtgcctgagcccccaccggtgggctggcagtgccccgggtgcaccttcatcaacaagcccacgcggcctggctgtgagatgtgctgccgggcgcgccccgaggcctaccaggtccccgcctcataccagcccgacgaggaggagcgagcgcgcctggcgggcgaggaggaggcgctgcgtcagtaccagcagcggaagcagcagcagcaggaggggaactacctgcagcacgtccagctggaccagaggagcctggtgctgaacacggagcccgccgagtgccccgtgtgctactcggtgctggcgcccggcgaggccgtggtgctgcgtgagtgtctgcacaccttctgcagggagtgcctgcagggcaccatccgcaacagccaggaggcggaggtctcctgccccttcattgacaacacctactcgtgctcgggcaagctgctggagagggagatcaaggcgctcctgacccctgaggattaccagcgatttctagacctgggcatctccattgctgaaaaccgcagtgccttcagctaccattgcaagaccccagattgcaagggatggtgcttctttgaggatgatgtcaatgagttcacctgccctgtgtgtttccacgtcaactgcctgctctgcaaggccatccatgagcagatgaactgcaaggagtatcaggaggacctggccctgcgggctcagaacgatgtggctgcccggcagacgacagagatgctgaaggtgatgctgcagcagggcgaggccatgcgctgcccccagtgccagatcgtggtacagaagaaggacggctgcgactggatccgctgcaccgtctgccacaccgagatctgctgggtcaccaagggcccacgctggggccctgggggcccaggagacaccagcgggggctgccgctgcagggtaaatgggattccttgccacccaagctgtcagaactgccactgagctaaagatggtggggccacatgctgacccagccccacatccacattctgttagaatgtagctcagggagcttcgtggacggccttgcttgctgtagcgttgtaggggccctgcctgcactgcggttgtccacggtcacatctgccccagtgcctttgtccttcccttggggcttgccggccagacttctctcccctgcggctcccacctctgcctgaccccagccttaaacatagcccctggccagaggccttgctgggtggagcctctgtgtgactccatactcctcccaccacaacactcatctgtcaaacaccaagcactctcagcctccccgccttcagctgtcagctttctggggctaacttctctgcctttgtggttggaggcctgaggcctcttggaactcttgctaacctgttcagagccaggaaggagactgcacagttttgaaagcacagcccgtcaggtccggctctgcgtctccctctctgcagcctgtgtaagctattataattaaaatggttttccgggaagggatgagtgtgatgtccttgagaggaaatgaatgtcctggcctgggactctacacacaggcaggatcctgaggtctctgggaactgcatcagaaagttgacttgtcagtccatctgtggtagaatgaggctgtgactgagcactgggacctttctaccagatgtggaccccatgcccagcctcaggggcaaggatgctcttgggtcaccgtcagccaggacaggtggagtgtgcagtgtgtcaagtctgcagagaaggatgggcttaggggcgggaggggaagtcttgccactcctgctcccttttgacctctcagcaggcatctagggttggcaggtagatagttcaagaaggaacgaagctgctgcagttgaggggtggggttgtccatcctattttctcgtctcaagcaagatggcacagtatcgattcagcagtatttactagaacccactctgtgctggtcggaggttactaagacagggtcctgggatgttcattctctaagtctttcctccgctctgtgacccaccctccttccccttttgagatctggtatttgatgcccaacacattgtccacgctgtgacgtgaccatcatcatagcaggcagagggcgcctctgctgctgaaggcctgtgattttgtggggaagggcctgttctagcaactggaaaggcactgccacctgccgttggatgccaggactcaagagctggccccagtcactgtgcgcagagctgtctgagaatgtgtgagtggactgggtccttcggcactgcctgcattggctcagggcagtcaaccgtcgcagaggatgaggggcacactcaggcagcctccccggccctggaggcagaaaggcccaggcagaaccactgactgggaggaaacagaaaaagcagaggagagccaggctgcaggcgtgtggatgggaccagctcaggcagacgctgtctcatacccactctcccctctcttgccagggcctggcctggtgtctctcaggagcctgggcatgagacaaaagcagagattgttctcttgtggtaccacaggctgtaaccagtccacccagtgttgttttagaaatttaaatcggttgcccatctttttaaattggcaacatcgtttaccacattaaaatctagatgccctgcttctcttgaaaa

SEQ ID NO: 200 - DNA, 730 bp, Homo sapiens
actcagggagccggaggggacgcgccggaggaaagatggaagactaccaggctgcggaggagactgcttttgttgttgatgaagtgagcaacattgtaaaagaggctatagaaagcgcaattggtggtaacgcttatcaacacagcaaagtgaaccagtggaccacaaatgtagtagaacaaactttaagccaactcaccaagctgggaaaaccatttaaatacatcgtgacctgtgtaattatgcagaagaatggagctggattacacacagcaagttcctgcttctgggacagctctactgacgggagctgcactgtgcgatgggagaataagaccatgtactgcatcgtcagtgccttcggactgtctatttgacctgcagtccagcctatggcctttctccttttgtctctagttcatcctctaaccaccagccatgaattcagtgaactcttttctcattctctttgttttgtggcactttcacaatgtagaggaaaaaaccaaatgaccgcactgtgatgtgaatggcaccgaagtcagatgagtatccctgtaggtcacctgcagcctgcgttgccacttgtcttaactctgaatatttcatttcaaaggtgctaaaatctgaaatctgctagtgtgaaacttgctctactctctgaaatgattcaaatacactaattttccatactttatacttttgttagaataaattattcaaatctaaa

SEQ ID NO: 201 - DNA, 2675 bp, Homo sapiens
gaaattcttacaaaaactgaaagtgaaatgaggaagacagattgagcaatccaatcggagggtaaatgccagcaaacctactgtacagtaggggtagagatgcagaaaggcagaaaggagaaaattcaggataactctcctgaggggtgagccaagccctgccatgtagtgcacgcaggacatcaacaaacacagataacaggaaatgatccattccctgtggtcacttattctaaaggccccaaccttcaaagttcaagtagtgatatggatgactccacagaaagggagcagtcacgccttacttcttgccttaagaaaagagaagaaatgaaactgaaggagtgtgtttccatcctcccacggaaggaaagcccctctgtccgatcctccaaagacggaaagctgctggctgcaaccttgctgctggcactgctgtcttgctgcctcacggtggtgtctttctaccaggtggccgccctgcaaggggacctggccagcctccgggcagagctgcagggccaccacgcggagaagctgccagcaggagcaggagcccccaaggccggcctggaggaagctccagctgtcaccgcgggactgaaaatctttgaaccaccagctccaggagaaggcaactccagtcagaacagcagaaataagcgtgccgttcagggtccagaagaaacagtcactcaagactgcttgcaactgattgcagacagtgaaacaccaactatacaaaaaggatcttacacatttgttccatggcttctcagctttaaaaggggaagtgccctagaagaaaaagagaataaaatattggtcaaagaaactggttacttttttatatatggtcaggttttatatactgataagacctacgccatgggacatctaattcagaggaagaaggtccatgtctttggggatgaattgagtctggtgactttgtttcgatgtattcaaaatatgcctgaaacactacccaataattcctgctattcagctggcattgcaaaactggaagaaggagatgaactccaacttgcaataccaagagaaaatgcacaaatatcactggatggagatgtcacattttttggtgcattgaaactgctgtgacctacttacaccatgtctgtagctattttcctccctttctctgtacctctaagaagaaagaatctaactgaaaataccaaaaaaaaaaaaaaaaaaaaaaaaaaaaaaagtagttaccattgccttttctgtgagctatttgttttggtttgctgaaactagtccaaaacaggaaatttaacagacagccacagccaaagagtgtcatgtgaattacaagaaatagagcccatttagggaaagatagaactagaaaggcttttcattataattccatgttgaacaattgagtcatagcttcttatcttggaggaaggacacaattcaaaggggcagtaaggattttgtaaaacgtggcatccataatttactatggagcaagtgcccacatctctaggacattaagacatttatgagaaatctcaggattcatcttctgtttttatgttaaatgcactccctccttttcagttaacattataaaaagtaaaaaatgaaaattttagaaatcttgcattagacacatgaaaaaataactaaaagtttaaatttaaatatgaaacaattttgctgaaaatagtatccatatactatttaagtcttttatggttatttcaagtatacaatttctatctgtaatgtaatatattacccacacatttttttcacaggagagagagaatatcctcatttgtttatgctcatgtgtattttctatagtgaatttcagaaacttttaatatcaggtaatttcaatttatgcctataaagcattgattgaaaaataactagaattgtgcatatataacacataatctccaacagaagttactgaatacattcatactaatgtaatgtaatttccctttatttcttgctcttctgtttcaaactgctgctattgtagtttacatatcccaacctttaaaaatattcctcttattagctttatattcactttatagaagttgagttttaattaaaattcttggcatcctgaagtatgtcacatagcatgtgctccttataaatatgttgatatctcagaagacagcatcccggttttcattttataaagtaccatacttaagaatgctgtaatacttatcttttataacatgtttccttcgctttgcttgtcttttatgtcatcagttttaactgtttacttcatttaacagtttacatcattcaacagtttacttcattaaacagtaggtggaaaaatagatgccagtctatgaaaatcttcccatctatatcaaaatacttttcaaggatatacttttcaaaacaaacgatttaaattttatgtttaaaatataaactttagatttaaactttatttaaatatctggttcctatgattttgacttcagtaagttcaaataaaatatattttgcaattcatttttacattataatttaaaaagaagaagcgataagtggagtcagtttcaatgctaggtggggtggttaatgatttttctggtgttgctgctaatgtggattaacaaataaaaacattcattgccttttgcctcataaaa

SEQ ID NO: 202 - DNA, 660 bp, Homo sapiens
actgcggccgctccgcaggcagagaagccgggagcgggcgaggcggcggcggcagcagcgatggcaggaatagagttggagcggtgccagcagcaggcgaacgaggtgacggaaattatgcgtaacaacttcggcaaggtcctggagcgtggtgtgaagctggccgaactgcagcagcgttcagaccaactcctggatatgagctcaaccttcaacaagactacacagaacctggcccagaagaagtgctgggagaacatccgttaccggatctgcgtggggctggtggtggttggtgtcctgctcatcatcctgattgtgctgctggtcgtctttctccctcagagcagtgacagcagtagtgccccacggacccaggatgcaggcattgcctcagggcctgggaactgacccagctggtcctgaaggagaagccaaatggctgcactggccgattctggtctccagaggaccttggtgtttgctctcccttgacccaccccagtgagtgccaaagggcagccccaacatgtgcacccctgcatttcctgtcatgccacagactggcccttgagggcagcctgctgtactggccatgctgggccagccccacctggagctcagtaaaaactgctgtttgattaaaagctggtatctgtg

SEQ ID NO: 203 - DNA, 4668 bp, Homo sapiens
ccagcgctgctccccgggcgctcctccccgggcgctcctccccaggcctcccgggcgcttggatcccggccatctccgcacccttcaagtgggtgtgggtgatttcctggcggggggagcagccaggtgagcccaagatgctgctgcgctcgaagcctgcgctgccgccgccgctgatgctgctgctcctggggccgctgggtcccctctcccctggcgccctgccccgacctgcgcaagcacaggacgtcgtggacctggacttcttcacccaggagccgctgcacctggtgagcccctcgttcctgtccgtcaccattgacgccaacctggccacggacccgcggttcctcatcctcctgggttctccaaagcttcgtaccttggccagaggcttgtctcctgcgtacctgaggtttggtggcaccaagacagacttcctaattttcgatcccaagaaggaatcaacctttgaagagagaagttactggcaatctcaagtcaaccaggatatttgcaaatatggatccatccctcctgatgtggaggagaagttacggttggaatggccctaccaggagcaattgctactccgagaacactaccagaaaaagttcaagaacagcacctactcaagaagctctgtagatgtgctatacacttttgcaaactgctcaggactggacttgatctttggcctaaatgcgttattaagaacagcagatttgcagtggaacagttctaatgctcagttgctcctggactactgctcttccaaggggtataacatttcttgggaactaggcaatgaacctaacagtttccttaagaaggctgatattttcatcaatgggtcgcagttaggagaagattttattcaattgcataaacttctaagaaagtccaccttcaaaaatgcaaaactctatggtcctgatgttggtcagcctcgaagaaagacggctaagatgctgaagagcttcctgaaggctggtggagaagtgattgattcagttacatggcatcactactatttgaatggacggactgctaccaaggaagattttctaaaccctgatgtattggacatttttatttcatctgtgcaaaaagttttccaggtggttgagagcaccaggcctggcaagaaggtctggttaggagaaacaagctctgcatatggaggcggagcgcccttgctatccgacacctttgcagctggctttatgtggctggataaattgggcctgtcagcccgaatgggaatagaagtggtgatgaggcaagtattctttggagcaggaaactaccatttagtggatgaaaacttcgatcctttacctgattattggctatctcttctgttcaagaaattggtgggcaccaaggtgttaatggcaagcgtgcaaggttcaaagagaaggaagcttcgagtataccttcattgcacaaacactgacaatccaaggtataaagaaggagatttaactctgtatgccataaacctccataatgtcaccaagtacttgcggttaccctatcctttttctaacaagcaagtggataaataccttctaagacctttgggacctcatggattactttccaaatctgtccaactcaatggtctaactctaaagatggtggatgatcaaaccttgccacctttaatggaaaaacctctccggccaggaagttcactgggcttgccagctttctcatatagtttttttgtgataagaaatgccaaagttgctgcttgcatctgaaaataaaatatactagtcctgacactgaatttttcaagtatactaagagtaaagcaactcaagttataggaaaggaagcagataccttgcaaagcaactagtgggtgcttgagagacactgggacactgtcagtgctagatttagcacagtattttgatctcgctaggtagaacactgctaataataatagctaataataccttgttccaaatactgcttagcattttgcatgttttacttttatctaaagttttgttttgttttattatttatttatttatttattttgagacagaatctctctctgtcacccaggctggagtgccatggtgcgatcttggctcactgcaactttaagcaattctcctgcctcagcttcctgagtagctgggattataggcgtgtgccaccacgcccagctactttctatattttttgtagagatggagtttcgccatattggccaagctggtctcgaactcctgtcctcgaactcctgtcctcaagtgatccacccgcctcagcctctcaaagtgctgggattacaggtgtgagccaccacacccagcagtgttttatttttgagacagggtatcattctgttgcccaggcttgagtgcagtggtgcaatcatagatcactgcagccttttaactcctgggctcaagtcatcctcctgcttagcctcccaagtagctaggaccacagacacatgccatcacacttggctatttttaaaaaattttttgtagagatggggtctcgctatgttacccaaactggtcctgaactcctggactcaattgatcctcccaccttggccttccaggtgctgggatttctttgggagtacagcatggtacagcaggagatcatttgatgttacctctgtgcagtgttgctagtcagcgaaagactataatacctgtggggacagcgattagccaccacaaccagtctttatttaaagttattaaaaatggctgggcgcagtggctcacacctgtaatcctagcactttgggaggccgaggcagatggatcacctgacgtgaggaatttgataccagcctggccaacatggtgaaaccccatctctactaaaaaatacaaaaattagctgggtgtggtcctgtagtcccagctacttgggaggctggggcaggagaattacttgaacccaggaggcagaggttgcagtgagccgagattgtgccactgcactccagcctgggtgacagagagagattccatctcaaaaaaacaagttattaaaaatgtatatgaatgctcctaatatggtcaggaagcaaggaagcgaaggatatattatgagttttaagaaggtgcttagctgtatatttatctttcaaaatgtattagaagattttagaattctttccttcatgtgccatctctacaggcacccatcagaaaaagcatactgccgttaccgtgaaactggttgtaaaagagaaactatctatttgcaccttaaaagacagctagattttgctgattttcttctttcggttttctttgtcagcaataatatgtgagaggacagattgttagatatgatagtataaaaaatggttaatgacaattcagaggcgaggagattctgtaaacttaaaattactataaatgaaattgatttgtcaagaggataaattttagaaaacacccaataccttataactgtctgttaatgcttgctttttctctacctttcttccttgtttcagttgggaagcttttggctgcaagtaacagaaactcctaattcaaatggcttaagcaataaggaaatgtatattcccacataactagacgttcaaacaggccaggctccagcacttcagtacgtcaccagggatctgggttcttcccagctctctgctctgccatctttagcgctggcttcattctcagactctggtagcatgatggctgtagctgtttcatgggccccttcaaacctcatagcaaccagaggaagaaaatgagccattttttgagtctccttcatagacttgaataactctttttcagagcttctcacagcaaacctctcctcatgtctcctcatgtcttattgttcagaaatgggtaatgtggccatttcaccagtcactgccaacaacaacgaggttcctataattgtctctgagtaaccctttggaatggagagggtgttggtcagtctacaaactgaacactgcagttctgcgctttttaccagtgaaaaaatgtaattattttcccctcttaaggattaatattcttcaaatgtatgcctgttatggatatagtatctttaaaattttttattttaatagctttaggggtacacactttttgcttacaggggtgaattgtgtagtggtgaagactcggcttttaatgtacttgtcacctgagtgatgtacattgtacccaataggtaatttttcatccattaccctccttccgccctcttcccttctgagtctccaacatcccttataccactgtgtatgttcttgtgtacctacagctaagcttccacttataagtgagaacatgcagtatttggttttccattcctgagttacttcccttaggataacagcccccagttccgtccaagttgctgcaaaatacattattcttctttatggctgagtaatagtccatggtacatatataccacattttctttatccacttatcagttgatggacacttaggttaattccattcaatttcattcaatttaagtatatttgtaaggagctaaagctgaaaattaaattttagatctttcaatactcttaaattttatatgtaagtggtttttatattttcacatttgaaataaagtaatttttataatcttgaaaaaaaaaaaaaaaaa

SEQ ID NO: 204 - DNA, 3229 bp, Homo sapiens
aaatgagttttaaaaaggcttgtccaggaagcacatatgggagctggtcactctgcattttgggccctcctggaggtgtttagaccttccgagagagaaactgagacacatgagagggaagaaatgactcagtggtgagaccctgtggagtcccacccacaaccagcacactgtgacccactgcacaaacctctagcccacagctcacttcctcctttaagaagagaagagaaaagaggagaggagaggaggaacagaaaagaaaagaaaagaaaaagtgggaaacaaataatctaagaatgaggagaaagcaagaagagtgacccccttgtgggcactccattggttttatggcgcctctactttctggagtttgtgtaaaacaaaaatattatggtctttgtgcacatttacatcaagctcagcctgggcggcacagccagatgcgagatgcgtctctgctgatctgagtctgcctgcagcatggacctgggtcttccctgaagcatctccagggctggagggacgactgccatgcaccgagggctcatccatccacagagcagggcagtgggaggagacgccatgacccccatcctcacggtcctgatctgtctcgggctgagtctgggcccccggacccacgtgcaggcagggcacctccccaagcccaccctctgggctgaaccaggctctgtgatcacccaggggagtcctgtgaccctcaggtgtcaggggggccaggagacccaggagtaccgtctatatagagaaaagaaaacagcaccctggattacacggatcccacaggagcttgtgaagaagggccagttccccatcccatccatcacctgggaacacacagggcggtatcgctgttactatggtagcgacactgcaggccgctcagagagcagtgaccccctggagctggtggtgacaggagcctacatcaaacccaccctctcagcccagcccagccccgtggtgaactcaggagggaatgtaaccctccagtgtgactcacaggtggcatttgatggcttcattctgtgtaaggaaggagaagatgaacacccacaatgcctgaactcccagccccatgcccgtgggtcgtcccgcgccatcttctccgtgggccccgtgagcccgagtcgcaggtggtggtacaggtgctatgcttatgactcgaactctccctatgagtggtctctacccagtgatctcctggagctcctggtcctaggtgtttctaagaagccatcactctcagtgcagccaggtcctatcgtggcccctgaggagaccctgactctgcagtgtggctctgatgctggctacaacagatttgttctgtataaggacggggaacgtgacttccttcagctcgctggcgcacagccccaggctgggctctcccaggccaacttcaccctgggccctgtgagccgctcctacgggggccagtacagatgctacggtgcacacaacctctcctccgagtggtcggcccccagcgaccccctggacatcctgatcgcaggacagttctatgacagagtctccctctcggtgcagccgggccccacggtggcctcaggagagaacgtgaccctgctgtgtcagtcacagggatggatgcaaactttccttctgaccaaggagggggcagctgatgacccatggcgtctaagatcaacgtaccaatctcaaaaataccaggctgaattccccatgggtcctgtgacctcagcccatgcggggacctacaggtgctacggctcacagagctccaaaccctacctgctgactcaccccagtgaccccctggagctcgtggtctcaggaccgtctgggggccccagctccccgacaacaggccccacctccacatctggccctgaggaccagcccctcacccccaccgggtcggatccccagagtggtctgggaaggcacctgggggttgtgatcggcatcttggtggccgtcatcctactgctcctcctcctcctcctcctcttcctcatcctccgacatcgacgtcagggcaaacactggacatcgacccagagaaaggctgatttccaacatcctgcaggggctgtggggccagagcccacagacagaggcctgcagtggaggtccagcccagctgccgatgcccaggaagaaaacctctatgctgccgtgaagcacacacagcctgaggatggggtggagatggacactcggagcccacacgatgaagacccccaggcagtgacgtatgccgaggtgaaacactccagacctaggagagaaatggcctctcctccttccccactgtctggggaattcctggacacaaaggacagacaggcggaagaggacaggcagatggacactgaggctgctgcatctgaagccccccaggatgtgacctacgcccagctgcacagcttgaccctcagacgggaggcaactgagcctcctccatcccaggaagggccctctccagctgtgcccagcatctacgccactctggccatccactagcccagggggggacgcagaccccacactccatggagtctggaatgcatgggagctgcccccccagtggacaccattggaccccacccagcctggatctaccccaggagactctgggaacttttaggggtcactcaattctgcagtataaataactaatgtctctacaattttgaaataaagcaacagacttctcaataatcaatgaagtagctgagaaaactaagtcagaaagtgcattaaactgaatcacaatgtaaatattacacatcaagcgatgaaactggaaaactacaagccacgaatgaatgaattaggaaagaaaaaaagtaggaaatgaatgatcttggctttcctataagaaatttagggcagggcacggtggctcacgcctgtaattccagcactttgggaggccgaggcgggcagatcacgagttcaggagatcgagaccatcttggccaacatggtgaaaccctgtctctcctaaaaatacaaaaattagctggatgtggtggcagtgcctgtaatcccagctatttgggaggctgaggcaggagaatcgcttgaaccagggagtcagaggtttcagtgagccaagatcgcaccactgctctccagcctggcgacagagggagactccatctcaaattaaaaaaaaaaaaaaaaaagaaagaaaaaaaaaaaaaaaaaa

SEQ ID NO: 205 - DNA, 4256 bp, Homo sapiens
ctgctggggtgagcagcactgtaaagatgaagctggctaactggtactggctgagctcagctgttcttgccacttacggttttttggttgtggcaaacaatgaaacagaggaaattaaagatgaaagagcaaaggatgtctgcccagtgagactagaaagcagagggaaatgcgaagaggcaggggagtgcccctaccaggtaagcctgccccccttgactattcagctcccgaagcaattcagcaggatcgaggaggtgttcaaagaagtccaaaacctcaaggaaatcgtaaatagtctaaagaaatcttgccaagactgcaagctgcaggctgatgacaacggagacccaggcagaaacggactgttgttacccagtacaggagccccgggagaggttggtgataacagagttagagaattagagagtgaggttaacaagctgtcctctgagctaaagaatgccaaagaggagatcaatgtacttcatggtcgcctggagaagctgaatcttgtaaatatgaacaacatagaaaattatgttgacagcaaagtggcaaatctaacatttgttgtcaatagtttggatggcaaatgttcaaagtgtcccagccaagaacaaatacagtcacgtccagttcaacatctaatatataaagattgctctgactactacgcaataggcaaaagaagcagtgagacctacagagttacacctgatcccaaaaatagtagctttgaagtttactgtgacatggagaccatggggggaggctggacagtgctgcaggcacgtctcgatgggagcaccaacttcaccagaacatggcaagactacaaagcaggctttggaaacctcagaagggaattttggctggggaacgataaaattcatcttctgaccaagagtaaggaaatgattctgagaatagatcttgaagactttaatggtgtcgaactatatgccttgtatgatcagttttatgtggctaatgagtttctcaaatatcgtttacacgttggtaactataatggcacagctggagatgcattacgtttcaacaaacattacaaccacgatctgaagtttttcaccactccagataaagacaatgatcgatatccttctgggaactgtgggctgtactacagttcaggctggtggtttgatgcatgtctttctgcaaacttaaatggcaaatattatcaccaaaaatacagaggtgtccgtaatgggattttctggggtacctggcctggtgtaagtgaggcacaccctggtggctacaagtcctccttcaaagaggctaagatgatgatcagacccaagcactttaagccataaatcactctgttcattcctccaggtattcgttatctaatagggcaattaattccttcagcactttagaatatgccttgtttcatatttttcatagctaaaaaatgatgtctgacggctaggttcttatgctacacagcatttgaaataaagctgaaaaacaatgcattttaaaggagtcctttgttgttatgctgttatccaatgaacacttgcaagcaattagcaatattgagaattatacattagatttacaattcttttaatttctattgaaactttttctattgcttgtattacttgctgtatttaaaaaataattgttggctgggtgtggtagctcacgcctgtaatcccagcactttggaatgtcaaggcaggcagatcacttgaggtcaggagtttgagaccagcctggccaaacatgtgaaacgctgtctctattaaaaatacaaaaattagccgggcatggtggtacatgcctgtaatcctagctacttgggaggctgaggcaggagaatcgcttgaacctgagaggaagaggttgcagtgagccaagactgagccactgcactccagcatgggtgacagagaaaactctgtctcaaacaaaaaaataataaaatttattcagtaggctggattctacacaaagtaatctgtatttgggccatgatttaagcacatctgaaggtatatcactcttttcaggctataattatttgggtaatcttcattctgagacaaacttaatctatatcatttactttgcaacagaacaaccctacagcattttggttcccagactaagggaactaatatctatataattaaacttgttcatttatcattcatgaaatataaaatacttgtcatttaaaccgtttaaaaatgtggtagcataatgtcaccccaaaaagcattcagaaagcaatgtaactgtgaagaccagggtttaaaggtaattcatttatagtttataactccttagatgtttgatgttgaaaactgctttaacatgaaaattatcttcctctgctctgtgtgaacaatagcttttaatttaagattgctcactactgtactagactactggtaggtttttttggggggggtgggtagggatatgtgggtaatgaagcatttacttacaggctatcatactctgaggccaattttatctccaaagcaataatatcattaagtgattcacttcatagaaggctaagtttctctaggacagatagaaaacatgaattttgaaatatatagaacagtagttaaaatactatatatttcaaccctggctggtagattgcttattttactatcagaaactaaaagatagatttttacccaaacagaagtatctgtaatttttataattcatcaattctggaatgctatatataatatttaaaagactttttaaatgtgtttaatttcatcatcgtaaaaagggatcatctcagagagaacagcagtattctgcgtatttttaaaaatgctctagagtaacatttgaagtaattcactgtagtgtatgccagtcctagaaataatttttttaatttctggtgtctgtttctaatacactaaccaagttttcaaaatatatttacaaagatgcatctttacccattattttaaaatgattaaggaggatagttgcttcaggtaacaagctaatttttcaaatattaggcccttacagaactatttagtcaaaaagtaagatattcctttaaaatatataacccaaagctttcagttaaacatgatatatcacaaatactattaaaatgttaaagagaaatgcaaatagcattaaatgatgaccaaaatgtaaaatattgtagatttcaaaagctgtgtctctattaggtgggataccaaatgtaaatgatgtaactgacgttgttttttactttttactttttaaaaaagactaaaaacgttttgatattatacaatgtatttgtttcagataaggtcattgtcatttagtatatataattaatatatgtacaagtttaagtaaattcctgtgagtaaaaatggacttatcacaaaacatagttctaaagaaaggtatatgctcatatacacggtgtccattaatttaatgggaactaggtataacttcaggagaatttggcaaataattcattaatccatgtaaatattcaaaagcttgttctatccacattatttcaagggatcactttatttttcattatactttcacagcacttttctagtaaattctgtaacacagaaattccattttggaatcatttcatgttaccaataattctagacttttataacatttaacatgttgatggaaatagattacatctgctagaaccttttgccttaactattcaccaatatatgctaatattcataaatatggattgactgtttacaaacattagaatcttgtcttggttccattttgatggctaatatttgttatcttaattaagactatttctgaggtcatgattacttgaaaatattgactaaaactgggtccttagaaattccaggtggagctgatttacctatgactgaggggaaaaaaaaatcaaattttactgataatagtaatgctccaaatgaattaatgacacatctgttcaataaataaagagcttaaatatacaaaacataagaaatctgggcaacaaaacttgtggtctttacttttgaatagctacccaagaaaaggttttaaaggtaaaagttatgagtaatgtcatcacaataagctcttgtttaaaattcttttcttttatgtataattaggtttatgtttcatgtctttttaaaaccttataaaagatttaattatcacatctattcttcaatgtggaaatattaaatattgttggttgtaaaataata

SEQ ID NO: 206 - DNA, 1853 bp, Homo sapiens
gccaaagggaagtgctgcgaggtttacaaccagctgcagtggttcgatgggaaggatctttctccaagtggttcctcttgaggggagcatttctgctggctccaggactttggccatctataaagcttggcaatgagaaataagaaaattctcaaggaggacgagctcttgagtgagacccaacaagctgcttttcaccaaattgcaatggagcctttcgaaatcaatgttccaaagcccaagaggagaaatggggtgaacttctccctagctgtggtggtcatctacctgatcctgctcaccgctggcgctgggctgctggtggtccaagttctgaatctgcaggcgcggctccgggtcctggagatgtatttcctcaatgacactctggcggctgaggacagcccgtccttctccttgctgcagtcagcacaccctggagaacacctggctcagggtgcatcgaggctgcaagtcctgcaggcccaactcacctgggtccgcgtcagccatgagcacttgctgcagcgggtagacaacttcactcagaacccagggatgttcagaatcaaaggtgaacaaggcgccccaggtcttcaaggtcacaagggggccatgggcatgcctggtgcccctggcccgccgggaccacctgctgagaagggagccaagggggctatgggacgagatggagcaacaggcccctcgggaccccaaggcccaccgggagtcaagggagaggcgggcctccaaggaccccagggtgctccagggaagcaaggagccactggcaccccaggaccccaaggagagaagggcagcaaaggcgatgggggtctcattggcccaaaaggggaaactggaactaagggagagaaaggagacctgggtctcccaggaagcaaaggggacaggggcatgaaaggagatgcaggggtcatggggcctcctggagcccaggggagtaaaggtgacttcgggaggccaggcccaccaggtttggctggttttcctggagctaaaggagatcaaggacaacctggactgcagggtgttccgggccctcctggtgcagtgggacacccaggtgccaagggtgagcctggcagtgctggctcccctgggcgagcaggacttccagggagccccgggagtccaggagccacaggcctgaaaggaagcaaaggggacacaggacttcaaggacagcaaggaagaaaaggagaatcaggagttccaggccctgcaggtgtgaagggagaacaggggagcccagggctggcaggtcccaagggagcccctggacaagctggccagaagggagaccagggagtgaaaggatcttctggggagcaaggagtaaagggagaaaaaggtgaaagaggtgaaaactcagtgtccgtcaggattgtcggcagtagtaaccgaggccgggctgaagtttactacagtggtacctgggggacaatttgcgatgacgagtggcaaaattctgatgccattgtcttctgccgcatgctgggttactccaaaggaagggccctgtacaaagtgggagctggcactgggcagatctggctggataatgttcagtgtcggggcacggagagtaccctgtggagctgcaccaagaatagctggggccatcatgactgcagccacgaggaggacgcaggcgtggagtgcagcgtctgacccggaaaccctttcacttctctgctcccgaggtgtcctcgggctcatatgtgggaaggcagaggatctctgaggagttccctggggacaactgagcagcctctggagaggggccattaataaagctcaacatcattggcaaaaaaaaaaaaaaaaaa

SEQ ID NO: 207 - DNA, 5829 bp, Homo sapiens
ctttcctagagtctctgaagccacagatctcttaagaactttctgtctccaaaccgtggctgctcgataaatcagacagaacagttaatcctcaatttaagcctgatctaacccctagaaacagatatagaacaatggaagtgacaacaagattgacatggaatgatgaaaatcatctgcgcaagctgcttggaaatgtttctttgagtcttctctataagtctagtgttcatggaggtagcattgaagatatggttgaaagatgcagccgtcagggatgtactataacaatggcttacattgattacaatatgattgtagcctttatgcttggaaattatattaatttacatgaaagttctacagagccaaatgattccctatggttttcacttcaaaagaaaaatgacaccactgaaatagaaactttactcttaaatacagcaccaaaaattattgatgagcaactggtgtgtcgtttatcgaaaacggatattttcattatatgtcgagataataaaatttatctagataaaatgataacaagaaacttgaaactaaggttttatggccaccgtcagtatttggaatgtgaagtttttcgagttgaaggaattaaggataacctagacgacataaagaggataattaaagccagagagcacagaaataggcttctagcagacatcagagactataggccctatgcagacttggtttcagaaattcgtattcttttggtgggtccagttgggtctggaaagtccagttttttcaattcagtcaagtctatttttcatggccatgtgactggccaagccgtagtggggtctgatatcaccagcataaccgagcggtataggatatattctgttaaagatggaaaaaatggaaaatctctgccatttatgttgtgtgacactatggggctagatggggcagaaggagcaggactgtgcatggatgacattccccacatcttaaaaggttgtatgccagacagatatcagtttaattcccgtaaaccaattacacctgagcattctacttttatcacctctccatctctgaaggacaggattcactgtgtggcttatgtcttagacatcaactctattgacaatctctactctaaaatgttggcaaaagtgaagcaagttcacaaagaagtattaaactgtggtatagcatatgtggccttgcttactaaagtggatgattgcagtgaggttcttcaagacaactttttaaacatgagtagatctatgacttctcaaagccgggtcatgaatgtccataaaatgctaggcattcctatttccaatattttgatggttggaaattatgcttcagatttggaactggaccccatgaaggatattctcatcctctctgcactgaggcagatgctgcgggctgcagatgattttttagaagatttgcctcttgaggaaactggtgcaattgagagagcgttacagccctgcatttgagataagttgccttgattctgacatttggcccagcctgtactggtgtgccgcaatgagagtcaatctctattgacagcctgcttcagattttgcttttgttcgttttgccttctgtccttggaacagtcatatctcaagttcaaaggccaaaacctgagaagcggtgggctaagataggtcctactgcaaaccacccctccatatttccgtaccatttacaattcagtttctgtgacatctttttaaaccactggaggaaaaatgagatattctctaatttattcttctataacactctatatagagctatgtgagtactaatcacattgaataatagttataaaattattgtatagacatctgcttcttaaacagattgtgagttctttgagaaacagcgtggattttacttatctgtgtattcacagagcttagcacagtgcctggtaatgagcaagcatacttgccattacttttccttcccactctctccaacatcacattcactttaaatttttctgtatatagaaaggaaaactagcctgggcaacatgatgaaaccccatctccactgcaaaaaaaaaaaaaaaaaataagaaagaacaaaacaaaccccacaaaaattagctgggtatgatggcacgtgcctgtagtcccagttactcaggatgattgattgagccttggaggtggaggctacagtgagctgagattgtgccactgtactctagccagggagaaagagtgagatcctggctcaaaaaaaccaaataaaacaaaacaaacaaacgaaaaacagaaaggaagactgaaagagaatgaaaagctggggagaggaaataaaaataaagaaggaagagtgtttcatttatatctgaatgaaaatatgaatgactctaagtaattgaattaattaaaatgagccaacttttttttaacaatttacattttatttctatgggaaaaaataaatattcctcttctaacaaacccatgcttgattttcattaattgaattccaaatcatcctagccatgtgtccttccatttaggttactggggcaaatcagtaagaaagttcttatatttatgctccaaataattctgaagtcctcttactagctgtgaaagctagtactattaagaaagaaaacaaaattcccaaaagatagctttcacttttttttttccttaaagacttcctaattctcttctccaaattcttagtcttcttcaaaataatatgctttggttcaatagttatccacattctgacagtctaatttagttttaatcagaattatactcatcttttgggtagtcatagatattaagaaagcaagagtttcttatgtccagttatggaatatttcctaaagcaaggctgcaggtgaagttgtgctcaagtgaatgttcaggagacacaattcagtggaagaaattaagtctttaaaaaagacctaggaataggagaaccatggaaattgaggaggtaggcctacaagtagatattgggaacaaaattagagaggcaaccagaaaaagttattttaggctcaccagagttgttcttattgcacagtaacacaccaatataccaaaacagcaggtattgcagtagagaaagagtttaataattgaatggcagaaaaatgaggaaggttgaggaaacctcaaatctacctccctgctgagtctaagtttaggatttttaagagaaaggcaggtaaggtgctgaaggtctggagctgctgatttgttggggtatagggaatgaaatgaaacatacagagatgaaaactggaagtttttttttgtttgttttgttttttttttgttgttgtttttttttttttttgtttttttgctgagtcaattccttggagggggtcttcagactgactggtgtcagcagacccatgggattccaagatctggaaaactttttagatagaaacttgatgtttcttaacgttacatatattatcttatagaaataactaagggaagttagtgccttgtgaccacatctatgtgacttttaggcagtaagaaactataaggaaaggagctaacagtcatgctgtaagtagctacagggaattggcttaaagggcaagttggttagtacttagctgtgtttttattcaaagtctacattttatgtagtggttaatgtttgctgttcattaggatggtttcacagttaccatacaaatgtagaagcaacaggtccaaaaagtagggcatgattttctccatgtaatccagggagaaaacaagccatgaccattgttggttgggagactgaaggtgattgaaggttcaccatcatcctcaccaacttttgggccataattcacccaaccctttggtggagcctgaaaaaaatctgggcagaatgtaggacttctttattttgtttaaaggggtaacacagagtgcccttatgaaggagttggagatcctgcaaggaagagaaggagtgaaggagagatcaagagagagaaacaatgaggaacatttcatttgacccaacatcctttaggagcataaatgttgacactaagttatcccttttgtgctaaaatggacagtattggcaaaatgataccacaacttcttattctctggctctatattgctttggaaacacttaaacatcaaatggagttaaatacatatttgaaatttaggttaggaaatattggtgaggaggcctcaaaaagggggaaacatcttttgtctgggaggatattttccattttgtggatttccctgatctttttctaccaccctgaggggtggtgggaattatcattttgctacattttagaggtcatccaggatttttgaaactttacattctttacggttaagcaagatgtacagctcagtcaaagacactaaattcttcttagaaaaatagtgctaaggagtatagcagatgacctatatgtgtgttggctgggagaatatcatcttaaagtgagagtgatgttgtggagacagttgaaatgtcaatgctagagcctctgtggtgtgaatgggcacgttaggttgttgcattagaaagtgactgtttctgacagaaatttgtagctttgtgcaaactcacccaccatctacctcaataaaatatagagaaaagaaaaatagagcagtttgagttctatgaggtatgcaggcccagagagacataagtatgttcctttagtcttgcttcctgtgtgccacactgcccctccacaaccatagctgggggcaattgtttaaagtcattttgttcccgactagctgccttgcacattatcttcattttcctggaatttgatacagagagcaatttatagccaattgatagcttatgctgtttcaatgtaaattcgtggtaaataacttaggaactgcctcttctttttctttgaaaacctacttataactgttgctaataagaatgtgtattgttcaggacaacttgtctccatacagttgggttgtaaccctcatgcttggcccaaataaactctctacttatatcagtttttcctacacttcttccttttaggtcaacaataccaagaggggttactgtgctgggtaatgtgtaaacttgtgtcttgtttagaaagataaatttaaagactatcacattgctttttcataaaacaagacaggtctacaattaatttattttgacgcaaattgataggggggccaagtaagccccatatgcttaatgatcagctgatgaataatcatctcctagcaacataactcaatctaatgctaaggtacccacaagatggcaaggctgatcaaagtcgtcatggaatcctgcaaccaaaagccatgggaatttggaagccctcaaatcccattcctaatctgatgagtctatggaccaatttgtggaggacagtagattaaatagatctgatttttgccatcaatgtaaggaggataaaaacttgcataccaattgtacacccttgcaaaatctttctctgatgttggagaaaatgggccagtgagatcatggatatagaagtacagtcaatgttcagctgtaccctcccacaatcccacttccttcctcaacacaattcaaacaaatagactcagactgtttcaggctccaggacaggaagtgcagtgtaggcaaaattgcaaaaattgagggcacaggggtggaggtgggggggttgaataacaagctgtgctaaataattacgtgtaaatatattttttcatttttaaaaattgatttcttttgcacattccatgacaatatatgtcacatttttaaaataaatgcaaagaagcatacatccaa

SEQ ID NO: 208 - DNA, 1608 bp, Homo sapiens
gagcctccaagtgtccacaccctgtgtgtcctctgtcctgccagcaccgagggctcatccatccacagagcagtgcagtgggaggagacgccatgacccccatcctcacggtcctgatctgtctcgggctgagcctggaccccaggacccacgtgcaggcagggcccctccccaagcccaccctctgggctgagccaggctctgtgatcacccaagggagtcctgtgaccctcaggtgtcaggggagcctggagacgcaggagtaccatctatatagagaaaagaaaacagcactctggattacacggatcccacaggagcttgtgaagaagggccagttccccatcctatccatcacctgggaacatgcagggcggtattgctgtatctatggcagccacactgcaggcctctcagagagcagtgaccccctggagctggtggtgacaggagcctacagcaaacccaccctctcagctctgcccagccctgtggtgacctcaggagggaatgtgaccatccagtgtgactcacaggtggcatttgatggcttcattctgtgtaaggaaggagaagatgaacacccacaatgcctgaactcccattcccatgcccgtgggtcatcccgggccatcttctccgtgggccccgtgagcccaagtcgcaggtggtcgtacaggtgctatggttatgactcgcgcgctccctatgtgtggtctctacccagtgatctcctggggctcctggtcccaggtgtttctaagaagccatcactctcagtgcagccgggtcctgtcgtggcccctggggagaagctgaccttccagtgtggctctgatgccggctacgacagatttgttctgtacaaggagtggggacgtgacttcctccagcgccctggccggcagccccaggctgggctctcccaggccaacttcaccctgggccctgtgagccgctcctacgggggccagtacacatgctccggtgcatacaacctctcctccgagtggtcggcccccagcgaccccctggacatcctgatcacaggacagatccgtgccagacccttcctctccgtgcggccgggccccacagtggcctcaggagagaacgtgaccctgctgtgtcagtcacagggagggatgcacactttccttttgaccaaggagggggcagctgattccccgctgcgtctaaaatcaaagcgccaatctcataagtaccaggctgaattccccatgagtcctgtgacctcggcccacgcggggacctacaggtgctacggctcactcagctccaacccctacctgctgactcaccccagtgaccccctggagctcgtggtctcaggagcagctgagaccctcagcccaccacaaaacaagtccgactccaaggctggtgagtgaggagatgcttgccgtgatgacgctgggcacagagggtcaggtcctgtcaagaggagctgggtgtcctgggtggacatttgaagaattatattcattccaacttgaagaattattcaacacctttaacaatgtatatgtgaagtactttattctttcatattttaaaaataaaagataattatccatgagaaagcta

SEQ ID NO: 209 - DNA, 4412 bp, Homo sapiens
tcagagcgctgggcaccggccgggctgtggtccccgcgcgccgccgtcgcctctcgagcgggctcggctcacagcgaccggcggccggggagatgtgagctggggccggcgggcgcggccggaccgccgcgatgtggctcaagcccgaggaggtgctgctgaagaacgcgctgaagctctgggtgacccagaagagcagctgctacttcatcctgcagcggcgccgcgggcacggcgaggggggcggccgcctcaccggtcgcctggtcggcgctctggatgcagtgttggattccaatgcacgggtcgctccatttcgaattctgcttcaagttcccggctcccaggtttattctcccatagcatgtggtgcaacattagaggaaatcaatcagcactgggactggctggaacaaaatctcctccacaccttgtctgtctttgataataaagatgacattgccagttttgtcaaagggaaggtaaagccgtgtgtctgggtggctgacggatgacacggctgagccattctcctcgtcaggtgtgtctgtcgttgaagcagcgcacacttctcgggggcctgtgcacctcagtccctcctgcttcctgtcccttgcaccccctgccttcccattgctggctcactgagcagggactgtcatctctgtgtgtcaggctctgatagccgaggagaccagcagcaggctcgccgagcaggaggaggaacccgagaaattccgagaagccctggtgaagttcgaggccaggttcaacttccccgaggcggagaagctggtcacctactactcctgctgctgttggaagggcagggtgccccgccagggctggctgtacctcagcatcaaccacctctgcttctactccttcttcctgggcaaggaacttaaacttgtggttccgtgggttgatatccagaaattagaaagaacgtccaatgtctttctgacggataccatccgaatcaccacgcagaataaggagcgtgacttctccatgttcctgaacctggatgaggtgtttaaggtcatggagcagctggccgacgtgacgctgcgaaggctgctggataatgaggtctttgacctcgaccccgatctgcaggagccgagccagatcaccaagagggacctggaagccagagcacagaatgagttcttccgggctttcttcaggttgccgaggaaggagaagctgcacgcggttgtggactgttcgctctggacgccgttcagtcgctgtcacaccacggggcggatgttcgcctctgacagctacatctgctttgccagcagagaagatggctgctgtaagatcatcctgccactcagagaggtggtgagcatcgagaagatggaggacacgagcctgctgccgcatcccatcattgtcagtatcagaagcaaggtggccttccagttcattgagctccgggaccgagacagcctggtggaggcgctgcttgcgaggttgaagcaggtccacgccaaccaccccgtgcactacgacacctctgcggatgatgacatggcttcactcgtgtttcattcaacaagcatgtgcagtgaccacagatttggggatcttgaaatgatgtcttctcaaaatagcgaggagagtgagaaagagaagagcccgctgatgcaccccgatgccctggtcaccgccttccagcagtcaggcagccagagccctgactcccgaatgtccagagaacagataaaaataagcctgtggaatgaccactttgtggaatacggcagaaccgtgtgtatgtttcgcacagagaagattcggaagctcgtagccatgggcatccctgaatctttgcgagggagactctggcttctcttctcagatgcggtgacggatcttgcctcacaccctggttactacgggaatctggtggaggagtccctggggaaatgctgcctggtaaccgaggagatagaacgagacctgcaccgctccctgccagagcaccccgccttccagaacgaaacgggaattgctgctttgaggagagtcttgacggcctatgcccaccggaaccccaagattggatactgccagtccatgaacatcctgacctccgtgctgctgctgtacaccaaggaggaggaagccttctggctgttggttgctgtgtgtgagcggatgctgcccgattacttcaaccaccgagtgatcggggcacaagttgaccagtctgtcttcgaggagctcatcaagggtcatctcccagagctggcagagcacatgaacgacctctcagccctggcgtccgtctctctctcgtggttcctgaccctgttcctcagcatcatgcctctagagagtgcggtgaatgtggtagactgcttcttctatgatggcatcaaagccatcttccagctgggactggctgtgcttgaggccaatgctgaggacctgtgcagcagcaaggatgatggccaggccttgatgatcctcagcaggtttctagatcacattaagaatgaggacagcccagggcccccagttggcagccaccatgcctttttctccgacgaccaggagccctaccctgtgactgatatttcggacctgatccgggattcctatgagaaatttggagaccagtctgtggagcagatcgagcacctacgttacaagcacaggatcagggtcctccaaggccacgaggacaccacaaagcagaacgtgcttcgagtcgttatcccggaagtctcaattcttcctgaagacctagaggagctctacgacttattcaagagagaacatatgatgagctgttactgggagcagcccaggcccatggcctcacgccacgaccccagccggccctatgctgagcagtaccgcatagatgcccggcagtttgcacacctgtttcagctagtctcgccctggacctgcggggcccacacggagatcctcgccgaaaggacgttcaggctcttggatgacaacatggaccagctcatcgagttcaaagcgtttgtgagctgcctcgatattatgtataatggagaaatgaatgagaagattaaactattatacaggcttcatatccctccagcactcactgaaaatgaccgagacagccagtcgccgttgaggaatcctctgttgtcaacatcgagacccctggttttcgggaaacccaatggtgatgcagttgattatcagaaacagctgaagcagatgattaaggatttagccaaagaaaaagataaaactgagaaagaattgcccaaaatgagccagagagaatttatccagttctgtaaaactctgtacagtatgttccatgaagatccagaagaaaatgatttgtatcaagccatcgccacagtcaccacactgctgctgcagatcggggaggtggggcagcgaggcagcagctctggaagctgctcccaggagtgtggggaggagctgcgggcttcagctccttctcctgaggactcggtttttgcagacactgggaagacgccccaggactcccaggcatttccagaggcggcagaaagggactggactgtctcccttgaacatattttagcttcacttctgactgaacagtcattagtcaacttttttgaaaagccactggacatgaaatccaaacttgaaaatgccaagatcaatcagtacaatctcaaaacttttgaaatgagccaccaatcacaatctgaacttaagctgagtaacttgtagcaagacagcagctgctatgcacactggagtccaccataccaaagcacgaaccagactgtttcttggggtcagccctaaaccgagatttcagtctaccttaccaatggggcatctggctaaacaacctgacaaactgtggccaggggaaccgacacaaccctcaagcatttctatgtattgagaattgtcagtgccctaaggtatccattggttcccttgatgccaacttacaatttttaccggatttgctgaaatgggcacttctgctgtgatgctagtgttgattttgctctcagatgaacacaatgtctcatactaaccaagaagcaagaaaagccccatgctttcatttttcacttggagtgacaatgggagaggtcaggaatcaagttcactttcaagatctaagggagtccactatctgtgcaattgtatttggcttttttttgcactgtttcaatgctggtaattgaaaccattttaatatatttggttgtattcactttatatgtccttccaaaaatgttgttgtgtacaaaccatgctttcaatgttggcttccaagttttttaataagaaactttttgtatttacttggtccttttcttttaccttgtagttaagtgtcttaagctgtagactgtggcagtgaatgggtaagctggagatgt

SEQ ID NO: 210 - DNA, 6995 bp, Homo sapiens
gttacccagtacacttgcctgtggtgtcagcaagcactgtcgacttcttcctctggtgaagtgggtttacttgaacttgaaggaaagaaaaaaaaatgtctccacttctgagaagcatctgtgacatcactgaaattttcaatcagtatgtctctcatgattgtgatggagcagcattaactaagaaagacctgaagaacctccttgaaagggaatttggagctgtgcttcggagaccacatgaccctaagacggtagatctgatcctggaacttctggatcttgacagtaatgggcgtgtcgatttcaacgaattcctcctatttattttcaaagtggctcaagcttgttactatgctctcggccaggccacgggactggatgaggagaagcgagcccggtgtgacggaaaggagagcctgttacaagatcgcaggcaagaagaagaccaaaggagattcgagccccgggacagacaactggaagaagaacctgggcaacgacgcaggcagaagaggcaggaacaggagagggagctagctgagggagaggagcaaagtgagaaacaagagcgacttgaacagcgcgacaggcagcgccgcgacgaggagctgtggcggcaaaggcaagaatggcaagaacgggaagagcgccgtgcagaggaagagcagctgcagagttgcaaaggtcacgaaactgaggagtttccagacgaagagcaactgcgaaggcgggagctgctggagctgaggaggaagggccgcgaggagaaacagcagcaaaggcgagagcggcaagacagagtgttccaggaggaagaagagaaagagtggaggaagcgcgagacagtgctccggaaggaagaagagaagttgcaggaagaggagccgcagcggcaaagagagctccaggaggaagaagagcagctacggaagctggagcggcaagagctgaggagggagcgccaggaggaagagcagcagcagcaaaggctgaggcgcgagcagcaactaaggcgcaagcaggaggaggagaggcgcgagcagcaggaggagaggcgcgagcagcaggagaggcgcgagcagcaggaggagaggcgcgagcagcagctgaggcgcgagcaggaggagaggcgcgagcagcagctgaggcgcgagcaggaggaggagaggcgcgagcagcagctgaggcgcgagcaggaggaggagaggcgcgagcagcagctgaggcgcgagcagcagctgaggcgcgagcagcagctgaggcgcgagcagcagctgaggcgcgagcagcagctgaggcgcgagcagcagctgaggcgcgagcagcagctgaggcgcgagcagcagctgaggcgcgagcagcagctgaggcgcgagcaggaggaggagaggcacgagcagaagcacgagcaggagaggcgcgagcagcggctgaagcgcgagcaggaggagaggcgcgattggctgaagcgcgaggaggagacggagaggcacgagcaggagaggcgcaagcagcagctgaagcgcgaccaggaggaggagaggcgcgaacgttggctgaagctcgaggaggaggagaggcgcgagcagcaggagaggcgcgagcagcaactaaggcgggagcaagaggagaggcgcgagcagcggctgaagcgccaggaggaggaagagaggctccagcagcggttgaggagcgagcaacaactaagacgcgagcaggaggagaggcgcgagcagctgctgaagcgcgaggaggagaagaggctcgagcaggagaggcgagagcagcggctgaagcgcgagcaggaggagaggcgcgatcagctgctgaagcgcgaggaggagaggcgccagcagcggctgaagcgcgagcaggaagagaggctcgagcagcgactgaagcgcgaggaggtggagagactcgagcaggaggagaggcgcgagcagcggctgaagcgcgaggagccggaggaagagaggcgccagcagctgctgaagagcgaggagcaggaggagaggcgccagcagcaactaaggcgcgagcagcaggaaaggcgcgagcagcggctgaagcgcgaggaggaggaagagaggctcgagcagcggctgaagcgcgagcatgaggaagagaggcgcgagcaggagctagctgaggaggagcaggaacaggcccgggagcggattaagagccgcatcccgaagtggcagtggcagctagaaagcgaggccgacgcacggcaaagcaaagtctactcgaggccccgcaagcaggaagggcagaggcgccgccaagagcaggaggaaaagaggcggcgccgggagagtgagctgcaatggcaggaggaggaacgggctcaccggcagcagcaggaagaggagcagcgccgggacttcacatggcagtggcaggcggaggaaaagagcgagaggggccgtcagaggctgtcggccaggcccccattgcgggagcagcgggagaggcagctgagggccgaggagcgccagcagcgggaacaacggtttctcccggaggaggaggagaaggagcagcggcgccgccagcgacgcgagagggagaaagagctgcagttcctggaggaagaggagcagctccagcggcgggagcgtgcccaacagctccaggaggaggaggacggcctccaggaggatcaggagaggaggcgaagccaggagcagcgccgcgaccaaaaatggaggtggcaactagaagaagaaaggaagagacgccgccacacgctgtacgccaagccagccctacaagagcagctgaggaaggaacagcagctgctgcaggaggaggaggaggagctacagagagaggagcgcgagaagagaaggcgccaagaacaggagagacaataccgcgaggaagagcagctgcagcaggaggaagagcagctgctgagagaggaacgggagaaaagaagacgccaggagcgggaaaggcaatatcggaaggataagaagctgcagcagaaggaagagcagctgctgggagaggaaccggagaagagaaggcgccaggagcgggagaaaaaataccgcgaggaagaggagttgcagcaggaggaagagcagctgctgagagaggaacgggagaagagaaggcgccaggagtgggagaggcagtaccgcaaaaaagacgagctgcagcaggaagaagagcagctgctgagagaggaacgggagaaaagaagactccaggagcgggagaggcaatatcgggaggaagaggagctgcagcaggaggaagagcagctgctgggagaggaacgggagacgagaaggcgccaggagctggagaggcaatatcggaaggaagaggagctgcagcaggaggaagagcagctgctgagagaggaaccggagaagagaaggcgccaggagcgggagaggcaatgtcgggaggaagaggagctgcagcaggaggaagagcagctgctgagagaggaacgggagaagagaaggcgccaggagctggagaggcaatatcgggaggaagaggaggtgcagcaggaggaagagcagctgctgagagaggaaccggagaagagaaggcgccaggagctggagaggcaataccgcgaggaagaggagctgcagcaggaggaagagcagctgctgagagaggaacaggagaaaaggcgccaggagcgggagaggcagtatcgggaggaggaagagcttcagcgccagaaaaggaagcagcgataccgggatgaggatcagcgcagtgatctgaaatggcagtgggaaccagaaaaagaaaatgcagttcgtgataacaaggtttactgcaaaggcagagagaatgaacagttccggcagttggaagattcccagctgcgcgacagacaatcccagcaagatctgcagcacctgctgggtgaacagcaagagcgagatcgtgagcaagagaggaggcgctggcagcagcgcgacaggcatttcccagaggaagaacagctggagcgagaagagcaaaaggaagccaaaaggcgcgacaggaagtcccaagaggaaaagcagttgctgagagaggaaagagaagagaagagacgccgtcaagagacagacagaaaattccgcgaggaggaacagctgctccaggaaagggaggaacagccgctgcgccgccaagagcgtgacagaaaattccgcgaagaggaactgcgccatcaggaacaagggagaaaattcctcgaggaggaacagcggctgcgccgccaggaacgggagagaaaattccttaaggaggaacagcagctgcgctgccaggagcgcgagcaacagctgcgtcaggaccgcgacagaaaattccgcgaggaggaacagcagctgagccgccaagagcgtgacagaaaattccgtgaagaggaacagcaggtgcgccgccaggaacgagagagaaaattcctggaggaggaacagcagctgcgccaggagcgtcacagaaaattccgcgaagaggaacagctgctccaggaaagggaagaacagcagctgcaccgccaagagcgtgacagaaaattcctggaggaggaacaacagctgcgccgccaagagcgtgacagaaaattccgcgaacaggaactgcgcagtcaggaaccagagagaaaattcctcgaggaggaacagcagctgcaccgccagcaacggcagagaaaattcctccaggaggaacagcagctgcgccgccaggagcgcgggcaacagcggcgtcaggaccgtgacagaaaattccgcgaggaggaacagctgcgccaggagagggaggaacagcagctgagccgccaagagcgtgacagaaaattccgtttagaggaacagaaagtgcgccgccaggaacaagagagaaaattcatggaggacgaacagcagctgcgccgccaggagggccaacaacagctgcgccaggagcgcgacagaaaattccgcgaagacgaacagctgctccaggaaagggaagaacagcagctgcaccgccaagagcgtgacagaaaattcctcgaggaggaaccgcagctgcgccgccaggagcgcgaacaacagctgcgtcacgaccgcgacagaaaattccgtgaagaggaacagctgctccaggaaggggaggaacagcagctgcgccgccaagagcgtgacagaaaattccgcgaagaggaacagcagctccgccgtcaggaacgagagagaaaattcctccaggaggaacagcagctgcgccgccaggaactggagagaaaattccgtgaggaggaacagctgcgccaagaaacggagcaagagcagctgcgccgccaagaacgctacagaaaaatcctagaggaagagcagctccgtccggaaagggaagaacagcagctgcgccgccaggagcgcgacagaaaattccgcgaggaggaacagctccgccaggagagggaggaacagcagctgcgcagccaagagtctgacagaaaattccgcgaggaggaacagctacgccaggagagggaagaacagcagctgcgcccccaacagcgtgacggaaagtatcgctgggaagaagagcagctccaacttgaggaacaagagcagaggctgcggcaggagcgagaccggcagtaccgggcggaggagcagtttgccacgcaggagaagagtcgtcgtgaggaacaagaactatggcaagaagaggagcagaaacgtcgccaggaacgggaaaggaaattacgggaagaacacatccgccgccagcagaaggaggaacagaggcaccgccaagtcggggagataaaatcccaagaagggaagggccatgggcggcttctggagcccggcactcatcagtttgccagtgtcccagtgcgctccagccctctctatgagtacatccaagagcagagatctcaataccgcccttaagtgatgttgccaatatcttgacacctgccaaagcttcgagcacgggaaaatgagaaacactgggtaccaagtgataactcagatgtttctggttgtgggaaaactctctgatattagaatgtcttttcttccaaaatcttaaactacgctcattttacgcactttgtacttctgctttttattcttcctcaagtagttctttactgcaagatgtctttcttttgctctttgatgcagatgtggtgtgcatttaaaaaaaatataaatcatttaatttgtttaagaaattttgtttgaggaacatgttcatttattgctttcagaagtaacaagagtaataggatgatttgagattctaaacaatgggtcggtttgtttaatgactgacccatcttgtggaaagtgcagatacttttaatgttcaagttgctatttcttcttgaacctaaattgatcattgcctccaaacagcatttcatcttttgtggcatagttagcacaaattccaggtaactaaatttttataacccttgaatagtgcagggggagtgacctctgcataaaaacttcctgtaaaatcagcccattactggaagaaatatctgttaagaataggtttagctttgaagatttagaatttaaattagattttttttaaactcaactccacttaaacacataatctcatgaagaaataatgaggtgtttctcaacttcagagttcaaattttaaaactgtgtctgttgtagtctatagtgttcattctacttccccaagttttgatgagtttcagaatattatgaacctttgttaattttagcttgttagaaggaagctgctcagaatcccataaacatctgtcttactctagggccaataagagatcacatagagcatgttgggggtgtaaaagggaaaaatgtgtgaacataggggcaaatttctagaggccctttgacaagacccatttgcccacaatcatttgaggcctattgataataccttagatatattcttgttgaaataattggactgtgaaaaattaataataaatgtttggcaagtaa

SEQ ID NO: 211 - DNA, 1422 bp, Homo sapiens
agtcacatttcagccactgctctgagaatttgtgagcagcccctaacaggctgttacttcactacaactgacgatatgatcatcttaatttacttatttctcttgctatgggaagacactcaaggatggggattcaaggatggaatttttcataactccatatggcttgaacgagcagccggtgtgtaccacagagaagcacggtctggcaaatacaagctcacctacgcagaagctaaggcggtgtgtgaatttgaaggcggccatctcgcaacttacaagcagctagaggcagccagaaaaattggatttcatgtctgtgctgctggatggatggctaagggcagagttggataccccattgtgaagccagggcccaactgtggatttggaaaaactggcattattgattatggaatccgtctcaataggagtgaaagatgggatgcctattgctacaacccacacgcaaaggagtgtggtggcgtctttacagatccaaagcaaatttttaaatctccaggcttcccaaatgagtacgaagataaccaaatctgctactggcacattagactcaagtatggtcagcgtattcacctgagttttttagattttgaccttgaagatgacccaggttgcttggctgattatgttgaaatatatgacagttacgatgatgtccatggctttgtgggaagatactgtggagatgagcttccagatgacatcatcagtacaggaaatgtcatgaccttgaagtttctaagtgatgcttcagtgacagctggaggtttccaaatcaaatatgttgcaatggatcctgtatccaaatccagtcaaggaaaaaatacaagtactacttctactggaaataaaaactttttagctggaagatttagccacttataaaaaaaaaaaaaaggatgatcaaaacacacagtgtttatgttggaatcttttggaactcctttgatctcactgttattattaacatttatttattatttttctaaatgtgaaagcaatacataatttagggaaaattggaaaatataggaaactttaaacgagaaaatgaaacctctcataatcccactgcatagaaataacaagcgttaacattttcatatttttttctttcagtcatttttctatttgtggtatatgtatatatgtacctatatgtatttgcatttgaaattttggaatcctgctctatgtacagttttgtattatactttttaaatcttgaactttataaacattttctgaaatcattgattattctacaaaaacatgattttaaacagctgtaaaatattctatgatatgaatgttttatgcattatttaagcctgtctctattgttggaatttcaggtcattttcataaatattgttgcaataaatatccttgaacaca

SEQ ID NO: 212 - DNA, 1767 bp, Homo sapiens
atttgccattcttagcaactggccagtcaacaactcaactttataatgggaaaactagacgagctgagattcaacccacgtgagcggctgcagagccgctacccttaacagctctctctcgggattctaacattcccttctgtgacggagagacagcaggccgggacacgcatcccaggacggatccacagctggatggggaaggctgcgccaggcgggccggaagcctggcggtggcgtgcaggagccccgccctcctgggctggattcagccgggggcggggccgcgggcggggcctgtggcagcgggaatcccgaccccgcccctttccccacccctccatttctcgccatggcccctgcactgctcctgatccctgctgccctcgcctctttcatcctggcctttggcaccggagtggagttcgtgcgctttacctcccttcggccacttcttggagggatcccggagtctggtggtccggatgcccgccagggatggctggctgccctgcaggaccgcagcatccttgcccccctggcatgggatctggggctcctgcttctatttgttgggcagcacagcctcatggcagctgaaagagtgaaggcatggacatcccggtactttggggtccttcagaggtcactgtatgtggcctgcactgccctggccttgcagctggtgatgcggtactgggagcccatacccaaaggccctgtgttgtgggaggctcgggctgagccatgggccacctgggtgccgctcctctgctttgtgctccatgtcatctcctggctcctcatctttagcatccttctcgtctttgactatgctgagctcatgggcctcaaacaggtatactaccatgtgctggggctgggcgagcctctggccctgaagtctccccgggctctcagactcttctcccacctgcgccacccagtgtgtgtggagctgctgacagtgctgtgggtggtgcctaccctgggcacggaccgtctcctccttgctttcctccttaccctctacctgggcctggctcacgggcttgatcagcaagacctccgctacctccgggcccagctacaaagaaaactccacctgctctctcggccccaggatggggaggcagagtgaggagctcactctggttacaagccctgttcttcctctcccactgaattctaaatccttaacatccaggccctggctgcttcatgccagaggcccaaatccatggactgaaggagatgccccttctactacttgagactttattctctgggtccagctccataccctaaattctgagtttcagccactgaactccaaggtccacttctcaccagcaaggaagagtggggtatggaagtcatctgtcccttcactgtttagagcatgacactctccccctcaacagcctcctgagaaggaaaggatctgccctgaccactcccctggcactgttacttgcctctgcgcctcaggggtccccttctgcaccgctggcttccactccaagaaggtggaccagggtctgcaagttcaacggtcatagctgtccctccaggccccaaccttgcctcaccactcccggccctagtctctgcacctccttaggccctgcctctgggctcagaccccaacctagtcaaggggattctcctgctcttaactcgatgacttggggctccctgctctcccgaggaagatgctctgcaggaaaataaaagtcagcctttttctacataaaaaaaaaaaaa

SEQ ID NO: 213 - DNA, 4116 bp, Homo sapiens
gtttcgctttcctgcgcagagtctgcggaggggctcggctgcaccggggggatcgcgcctggcagaccccagaccgagcagaggcgacccagcgcgctcgggagaggctgcaccgccgcgcccccgcctagcccttccggatcctgcgcgcagaaaagtttcatttgctgtatgccatcctcgagagctgtctaggttaacgttcgcactctgtgtatataacctcgacagtcttggcacctaacgtgctgtgcgtagctgctcctttggttgaatccccaggcccttgttggggcacaaggtggcaggatgtctcagtggtacgaacttcagcagcttgactcaaaattcctggagcaggttcaccagctttatgatgacagttttcccatggaaatcagacagtacctggcacagtggttagaaaagcaagactgggagcacgctgccaatgatgtttcatttgccaccatccgttttcatgacctcctgtcacagctggatgatcaatatagtcgcttttctttggagaataacttcttgctacagcataacataaggaaaagcaagcgtaatcttcaggataattttcaggaagacccaatccagatgtctatgatcatttacagctgtctgaaggaagaaaggaaaattctggaaaacgcccagagatttaatcaggctcagtcggggaatattcagagcacagtgatgttagacaaacagaaagagcttgacagtaaagtcagaaatgtgaaggacaaggttatgtgtatagagcatgaaatcaagagcctggaagatttacaagatgaatatgacttcaaatgcaaaaccttgcagaacagagaacacgagaccaatggtgtggcaaagagtgatcagaaacaagaacagctgttactcaagaagatgtatttaatgcttgacaataagagaaaggaagtagttcacaaaataatagagttgctgaatgtcactgaacttacccagaatgccctgattaatgatgaactagtggagtggaagcggagacagcagagcgcctgtattggggggccgcccaatgcttgcttggatcagctgcagaactggttcactatagttgcggagagtctgcagcaagttcggcagcagcttaaaaagttggaggaattggaacagaaatacacctacgaacatgaccctatcacaaaaaacaaacaagtgttatgggaccgcaccttcagtcttttccagcagctcattcagagctcgtttgtggtggaaagacagccctgcatgccaacgcaccctcagaggccgctggtcttgaagacaggggtccagttcactgtgaagttgagactgttggtgaaattgcaagagctgaattataatttgaaagtcaaagtcttatttgataaagatgtgaatgagagaaatacagtaaaaggatttaggaagttcaacattttgggcacgcacacaaaagtgatgaacatggaggagtccaccaatggcagtctggcggctgaatttcggcacctgcaattgaaagaacagaaaaatgctggcaccagaacgaatgagggtcctctcatcgttactgaagagcttcactcccttagttttgaaacccaattgtgccagcctggtttggtaattgacctcgagacgacctctctgcccgttgtggtgatctccaacgtcagccagctcccgagcggttgggcctccatcctttggtacaacatgctggtggcggaacccaggaatctgtccttcttcctgactccaccatgtgcacgatgggctcagctttcagaagtgctgagttggcagttttcttctgtcaccaaaagaggtctcaatgtggaccagctgaacatgttgggagagaagcttcttggtcctaacgccagccccgatggtctcattccgtggacgaggttttgtaaggaaaatataaatgataaaaattttcccttctggctttggattgaaagcatcctagaactcattaaaaaacacctgctccctctctggaatgatgggtgcatcatgggcttcatcagcaaggagcgagagcgtgccctgttgaaggaccagcagccggggaccttcctgctgcggttcagtgagagctcccgggaaggggccatcacattcacatgggtggagcggtcccagaacggaggcgaacctgacttccatgcggttgaaccctacacgaagaaagaactttctgctgttactttccctgacatcattcgcaattacaaagtcatggctgctgagaatattcctgagaatcccctgaagtatctgtatccaaatattgacaaagaccatgcctttggaaagtattactccaggccaaaggaagcaccagagccaatggaacttgatggccctaaaggaactggatatatcaagactgagttgatttctgtgtctgaagttcacccttctagacttcagaccacagacaacctgctccccatgtctcctgaggagtttgacgaggtgtctcggatagtgggctctgtagaattcgacagtatgatgaacacagtatagagcatgaatttttttcatcttctctggcgacagttttccttctcatctgtgattccctcctgctactctgttccttcacatcctgtgtttctagggaaatgaaagaaaggccagcaaattcgctgcaacctgttgatagcaagtgaatttttctctaactcagaaacatcagttactctgaagggcatcatgcatcttactgaaggtaaaattgaaaggcattctctgaagagtgggtttcacaagtgaaaaacatccagatacacccaaagtatcaggacgagaatgagggtcctttgggaaaggagaagttaagcaacatctagcaaatgttatgcataaagtcagtgcccaactgttataggttgttggataaatcagtggttatttagggaactgcttgacgtaggaacggtaaatttctgtgggagaattcttacatgttttctttgctttaagtgtaactggcagttttccattggtttacctgtgaaatagttcaaagccaagtttatatacaattatatcagtcctctttcaaaggtagccatcatggatctggtagggggaaaatgtgtattttattacatctttcacattggctatttaaagacaaagacaaattctgtttcttgagaagagaatattagctttactgtttgttatggcttaatgacactagctaatatcaatagaaggatgtacatttccaaattcacaagttgtgtttgatatccaaagctgaatacattctgctttcatcttggtcacatacaattatttttacagttctcccaagggagttaggctattcacaaccactcattcaaaagttgaaattaaccatagatgtagataaactcagaaatttaattcatgtttcttaaatgggctactttgtcctttttgttattagggtggtatttagtctattagccacaaaattgggaaaggagtagaaaaagcagtaactgacaacttgaataatacaccagagataatatgagaatcagatcatttcaaaactcatttcctatgtaactgcattgagaactgcatatgtttcgctgatatatgtgtttttcacatttgcgaatggttccattctctctcctgtactttttccagacacttttttgagtggatgatgtttcgtgaagtatactgtatttttacctttttccttccttatcactgacacaaaaagtagattaagagatgggtttgacaaggttcttcccttttacatactgctgtctatgtggctgtatcttgtttttccactactgctaccacaactatattatcatgcaaatgctgtattcttctttggtggagataaagatttcttgagttttgttttaaaattaaagctaaagtatctgtattgcattaaatataatatgcacacagtgctttccgtggcactgcatacaatctgaggcctcctctctcagtttttatatagatggcgagaacctaagtttcagttgattttacaattgaaatgactaaaaaacaaagaagacaacattaaaacaatattgtttctaa

SEQ ID NO: 214 - DNA, 1962 bp, Homo sapiens
agacggtgccgacgcagcggtgttgcacctccctctccggctctgctgcccgggatttccccagaacctgcgccgcgcgagaaggagcctgggagcatccgcccacactgcccggacagtcggctcgactcggtgccctcggccccagccgggctccgctcctcgggcgcgcgaggggccgtggtggcggcggcgcccggcatgtttcatagtccgcggcggctctgctcggccctgctgcagagggacgcgcccggcctgcgccgcctgcccgccccagggctgcgccgcccgttgtccccgccggctgctgttcccaggcccgcatccccccggctgctggcggcggcctcggcggcctcgggcgccgcgaggtcgtgttcccgaacagtgtgttccatgggaaccggtacaagcagactctatagtgctctcgccaagacactgaacagcagcgctgcctcccagcacccagagtatttggtgtcacctgacccagagcatctggagcccattgatcctaaagagcttcttgaggaatgcagggccgtcctgcacacccgacctccccggttccagagggattttgtggatctgaggacagattgccctagtacccacccacctatcagggttatgcaatggaacatcctcgcccaagctcttggagaaggcaaagacaactttgtacagtgccctgttgaagcactcaaatgggaagaaaggaaatgtctcatcctggaagaaatcctggcctaccagcctgatatattgtgcctccaagaggtggaccactattttgacaccttccagccactcctcagtagactaggctatcaaggcacgtttttccccaaaccctggtcaccttgtctagatgtagaacacaacaatggaccagatggttgtgccttattttttcttcaaaaccgattcaagctagtcaacagtgccaatattaggctgacagccatgacattgaaaaccaaccaggtggccattgcacagaccctggagtgcaaggagtcaggccgacagttctgcatcgctgttacccatctaaaagcacgcactggctgggagcggtttcgatcagctcaaggctgtgacctccttcagaacctgcaaaacatcacccaaggagccaagattccccttattgtgtgtggggacttcaatgcagagccaacagaagaggtctacaaacactttgcttcctccagcctcaacctgaacagcgcctacaagctgctgagtgctgatgggcagtcagaacccccatacactacctggaagatccggacctcaggggagtgcaggcacaccctggattacatctggtattctaaacatgctctaaatgtaaggtcagctctcgatctgctcactgaagaacagattggacccaacaggttaccttccttcaattatccttcagaccacctgtctctagtgtgtgacttcagctttactgaggaatctgatggactttcataaatacttgcttttgtctttttaatcacaggagtctatttttttttttttttttttttttttgagacagagtctcgctctgttgcctaggctggagtacagtggcctgatctcggctcactgcaagatccgcctcccgggttcatggcattctcctgcctcagcctccagagcaactgggacaacaggcgcccgtcaccacgcccagctaattttttgtatttttagtagagacggggtttcaccgtgttagccaggatggtctcgatctcctgaccttgaatcacaagagtcttaacagggaatgtttcaggaaacaaataggataagacaatgccagaggaaggatagaaacatgggaagtttctatcatttcattttctgcgtttccagcatgcccttggaaaagactccctttagtccctttttcaattaaaacctatggtgaaaaaggcgtttgcactccaa

SEQ ID NO: 215 - DNA, 5412 bp, Homo sapiens
ctctgtctgggtccccaccttagtctacggtgtcgccttttctaactgcgagtgctaaggaagaggcgaggggcgggctccgaggctaggcgggcgctcggggttggagccgagggtctgggcaaaccggtgggtccctccccactgcgggagcggccagggtgggaaaaccgcggtcgggcgggcggggtagggccctcccgccgccgtggctcctggggaggccaggggtgaggagctgtcgccgcctttgcctctgcctcgagggccgcgctgaagagactggtaggagagcgccgcgggcggatggaggcgactcttcgccccgcctgagctcaggaggggctagcgcggagcgcgggtcccgcctccagccgcgggagcggccgcgcgagccaccactggaggaggaggaggaggagcggacgtcggcttctccccgcgggagcccccagcatggttgactatattgtggagtatgactatgatgctgtacatgatgatgaattaactattcgagttggagaaatcatcaggaatgtgaaaaagctacaggaggaagggtggctggaaggagaactaaatgggagaagaggaatgttccctgacaatttcgttaaggaaattaaaagagagacggaattcaaggatgacagtttgcccatcaaacgggaaaggcatgggaatgtagcaagtcttgtacaacgaataagcacctatggacttccagctggaggaattcagccacatccacaaaccaaaaacattaagaagaagaccaagaagcgtcagtgtaaagttctttttgagtacattccacaaaatgaggatgaactggagctgaaagtgggagatattattgatattaatgaagaggtagaagaaggctggtggagtggaaccctgaataacaagttgggactgtttccctcaaattttgtgaaagaattagaggtaacagatgatggtgaaactcatgaagcccaggacgattcagaaactgttttggctgggcctacttcacctataccttctctgggaaatgtgagtgaaactgcatctggatcagttacacagccaaagaaaattcgaggaattggatttggagacatttttaaagaaggctctgtgaaacttcggacaagaacatccagtagtgaaacagaagagaaaaaaccagaaaagcccttaatcctacagtcactgggacccaaaactcagagtgtggagataacaaaaacagataccgaaggtaaaattaaagctaaagaatattgtagaacattatttgcctatgaaggtactaatgaagatgaacttacttttaaagagggggagataatccatttgataagtaaggagactggagaagctggctggtggaggggcgaacttaatggtaaagaaggagtatttccagacaattttgctgtccagataaatgaacttgataaagactttccaaaaccaaagaaaccaccacctcctgctaaggctccagctccaaagcctgaactgatagctgcagagaagaaatatttttctttaaagcctgaagaaaaggatgaaaaatcaacactggaacagaaaccttctaaaccagcagctccacaagtcccacccaagaaacctactccacctaccaaagccagtaatttactgagatcttctggaacagtgtacccaaagcgacctgaaaaaccagttcctccaccacctcctatagccaagattaatggggaagtttctagcatttcatcaaaatttgaaactgagccagtatcaaaactaaagctagattctgaacagctgccccttagaccaaaatcagtagactttgattcacttacagtaaggacctccaaagaaacagatgttgtaaattttgatgacatagcttcctcagaaaacttgcttcatctcactgcaaatagaccaaagatgcctggaagaaggttgccgggccgtttcaatggtggacattctccaactcacagccccgaaaaaatcttgaagttaccaaaagaagaagacagtgccaacctgaagccatctgaattaaaaaaagatacatgctactctccaaagccatctgtgtacctttcaacaccttccagtgcttctaaagcaaatacaactgctttcctgactccattagaaatcaaagctaaagtggaaacagatgatgtgaaaaaaaattccctggatgaacttagagcccagattattgaattgttgtgcattgtagaagcactgaaaaaggatcacgggaaagaactggaaaaactgcgaaaagatttggaagaagagaagacaatgagaagtaatctagagatggaaatagagaagctgaaaaaagctgtcctgtcttcttgagtggtgtggacctggtgttcataatgttccagggattcagaagcaacgctatgaacttcagctgacttgttacttaaaaattgtgaattctgttgttgtgataaatatgagcaaatgaagtgtaatatctatagaaaagtagagtgagggtgaatttatatatatattttgttttgccaatatgaagaaaaagaggccttatttcttaactgtgctgggattgcaaacactttttaaaaaattgtttgcttgaaaatactactgaatataaataagaatgtgcacagtagtttttttattgaaacttgtattatttttaaagagatctatactataaatatggtgatatatttacaagtaatctgttaagatatactatttgagagggacagattagccttttagtaactatagtcactactttttccataatgcataagggatataaactctgtgtgtgtgtgtgtgtgtgtgtgtgtgtgtgtgtgtgtgtgtatatatatatatatatttttacttttatcctcttaccgaaggttacactgttgtgcctgtttgtctgcaatgctgtttatattttgggtgatgaaataggagtttcctagctatataaaccagattactcacccatgcatatagtaagaactaatgaataatcaaaataatttcatcaacttttagaatattttatgttgcttgcactataggagtcataaaaggaacttagttaaaatatgttggattgttaaacatttggggaaatatgaactgtattttaaatttgttaggtctgaagaatctaaaactgttaatttaacccttaacttgtgcctagaaactacagcacatataaaatatgtaaacaccagcctgttgctgtacttttctgcttattttacagcctcaaatatttctcattatcttgtcacttagttcttcatgtttctccttctgacttttaataatggtaataggaaaacaaaacccaaagcttttcagaacttcagtgtgaggtttcctattttgacaagttaacttgtaaatactcaggttttacgatgtataatttacctaatagaccaaactaactcatggagatattttgaactattatttaggtacaaactttataaagaatgttagtatgtcataaaatataacattacagcttatttaaaaccaaatatagttgaacatatttaaaatacattttcacagaatggatgaattagttgtttcttcagagttacttatgaacagttgaatgctttaaaatgttctgtctgtaggtaacatctaaaacacaagtgggtttatttaaatttttaaaatttgaaattttttatttgcaaaaaattgttttatgctttattatatcgcaaatgagtgtcagatttttgagtaccaatgatcatgcttccattttttttagttttaaaccaccaaaccaatatttttcctttaaattttaatcttataatatagaaatcttatgtaaatgaaattttgtcatgtttcaaataaagagaactgaagtagaaaatagaaatgccagtaaacaacataatgtttaatttacaacttacattaggggtttgggggaatgctaattatatattgagaatatacattagaactcttcaaaatgggctcttctaatgaggtcactactgaacaaaattgttccctcttctgttaaatagaataggtttaaatgactagtcaaatgaattattttcttcttgttaaataaattaaatcttactttcttttaatgaccaaccttaggtaaaacaaaaatattgtaatcctagaaattatcctccagctttctcacctgaaaatctattgaagtgatccctggtcatcctaataatgggatgagggaagtttccagcagatttcaggctgttcttaaagtttttgttggtcattttctcaatagtacatgaaatcaagatgcttatgagcatggaaatgtatttaaagtttttgcttgtgtcctcctcagtcagaatagaaaagtaactgaaatacttttacctttctgtccttgataaaatagtaaagaaaaccaaacaaacccaggcctgatgggaaaaatgattcctttattctagcaacttactttctgttggtatgggaaatgttattaatttctattactaaagttcatatcacaaaatgatatttaataataaccttggggtaaatcatgaattttttttctacgtgtgagtataaaagacaaaagttgaacagcatggaatctcattgccaaattattagtgaatgtatagttcaggtattctttgagacacacagtatcattaatttctgaattgtatttcagtgttattttttgtttgtgaccactaagcttctgtcttaatacaaagctgttaccttctacagaatttaagtctgaagatgtaaagagagaacaggccttgtgtaacagaagatactcttttttatgctccttactgtgatcacagaaaaattaaaaatccaagtgctctctagatttgttgataaacattttatgcttgcatttaaacttgaaatgtatgagcagaatgagacaatcagttaaatcagaaatgagaagtattataatgtaaaggccttgttttgctgtagcaataaaatgaccaagtgcaatgacttgatttaataaaatcatattttaaaagttgctgctatgaatatttttggctataaaattttaccctgacttgctttcaataactgttacgtaatgcagttgatgttgtaacctaacattccaaaaaaaaaattgagagggggaatctcaaaatagtatatacttcactaacttgtttacaggtgctgtatttaaaagcatgcttctctctcaaaaagaaaaattaaaggattttattgccagtcgtgtcagtctttattggttattttttgttaactttagcatttgtgtatttcagagtatgatgaaaattatattacttcaatttccaaatacaagaataaatagtaaaccaaaaacattaaaaa

SEQ ID NO: 216 - DNA, 2871 bp, Homo sapiens
gccgcgctgcgcacggatggcggcgggagccgcagagccaccatgttcagccagcagcagcagcagcagctccagcaacagcagcagcagctccagcagttacagcagcagcagctccagcagcagcaattgcagcagcagcagttactgcagctccagcagctgctccagcagtccccaccacaggccccgttgcccatggctgtcagccgggggctccccccgcagcagccacagcagccgcttctgaatctccagggcaccaactcagcctccctcctcaacggctccatgctgcagagagctttgcttttacagcagttgcaaggactggaccagtttgcaatgccaccagccacgtatgacactgccggtctcaccatgcccacagcaacactgggtaacctccgaggctatggcatggcatccccaggcctcgcagcccccagcctcacacccccacaactggccactccaaatttgcaacagttctttccccaggccactcgccagtccttgctgggacctcctcctgttggggtccccatgaacccttcccagttcaacctttcaggacggaacccccagaaacaggcccggacctcctcctctaccacccccaatcgaaaggattcttcttctcagacaatgcctgtggaagacaagtcagaccccccagaggggtctgaggaagccgcagagccccggatggacacaccagaagaccaagatttaccgccctgcccagaggacatcgccaaggaaaaacgcactccagcacctgagcctgagccttgtgaggcgtccgagctgccagcaaagagattgaggagctcagaagagcccacagagaaggaacctccagggcagttacaggtgaaggcccagccgcaggcccggatgacagtaccgaaacagacacagacaccagacctgctgcctgaggccctggaagcccaagtgctgccacgattccagccacgggtcctgcaggtccaggcccaggtgcagtcacagactcagccgcggataccatccacagacacccaggtgcagccaaagctgcagaagcaggcgcaaacacagacctctccagagcacttagtgctgcaacagaagcaggtgcagccacagctgcagcaggaggcagagccacagaagcaggtgcagccacaggtacagccacaggcacattcacagggcccaaggcaggtgcagctgcagcaggaggcagagccgctgaagcaggtgcagccacaggtgcagccccaggcacattcacagcccccaaggcaggtgcagctgcagctgcagaagcaggtccagacacagacatatccacaggtccacacacaggcacagccaagcgtccagccacaggagcatcctccagcgcaggtgtcagtacagccaccagagcagacccatgagcagcctcacacccagccgcaggtgtcgttgctggctccagagcaaacaccagttgtggttcatgtctgcgggctggagatgccacctgatgcagtagaagctggtggaggcatggaaaagaccttgccagagcctgtgggcacccaagtcagcatggaagagattcagaatgagtcggcctgtggcctagatgtgggagaatgtgaaaacagagcgagagagatgccaggggtatggggcgccgggggctccctgaaggtcaccattctgcagagcagtgacagccgggcctttagcactgtacccctgacacctgtcccccgccccagtgactccgtctcctccacccctgcggctaccagcactccctctaagcaggccctccagttcttctgctacatctgcaaggccagctgctccagccagcaggagttccaggaccacatgtcggagcctcagcaccagcagcggctaggggagatccagcacatgagccaagcctgcctcctgtccctgctgcccgtgccccgggacgtcctggagacagaggatgaggagcctccaccaaggcgctggtgcaacacctgccagctctactacatgggggacctgatccaacaccgcaggacacaggaccacaagattgccaaacaatccttgcgacccttctgcaccgtttgcaaccgctacttcaaaacccctcgcaagtttgtggagcacgtgaagtcccaggggcataaggacaaagccaaggagctgaagtcgcttgagaaagaaattgctggccaagatgaggaccacttcattacagtggacgctgtgggttgcttcgagggtgatgaagaagaggaagaggatgatgaggatgaagaagagatcgaggttgaggaggaactctgcaagcaggtgaggtccagagatatatccagagaggagtggaagggctcggagacctacagccccaatactgcatatggtgtggacttcctggtgcccgtgatgggctatatctgccgcatctgccacaagttctatcacagcaactcaggggcacagctctcccactgcaagtccctgggccactttgagaacctgcagaaatacaaggcggccaagaaccccagccccaccacccgacctgtgagccgccggtgcgcaatcaacgcccggaacgctttgacagccctgttcacctccagcggccgcccaccctcccagcccaacacccaggacaaaacacccagcaaggtgacggctcgaccctcccagcccccactacctcggcgctcaacccgcctcaaaacctgatagagggacctccctgtccctggcctgcctgggtccagatctgctaatgctttttaggagtctgcctggaaactttgacatggttcatgtttttactcaaaatccaataaaacaaggtagtttggctgtgca

SEQ ID NO: 217 - DNA, 1720 bp, Homo sapiens
cttggggcggcgagcatggcggcagcggctgcaggcctgggcggcggcggcgccggcccgggacccgaggccggggacttcctggcccgctaccggctggtatcgaacaagctgaagaagcggttcctgcggaagccgaacgtggcggaggccggcgagcagttcggacagctgggccgggagctgcgcgcccaggagtgtctgccctacgcggcctggtgccagctggcggtggcgcgctgccagcaggcgctcttccacgggcccggggaggcgctggccctcaccgaggccgcccgcctcttcctgcggcaggagcgcgacgcgcgccagcgcctggtctgccccgccgcctacggggagccgctgcaggccgccgccagcgccctgggcgccgcggtgcgtctgcacctcgagctgggccagccggccgccgccgccgccctctgcctcgagctggccgccgccctgcgcgacctgggccagccggccgccgccgccggtcacttccagcgcgccgcccagctccagctgccccagctgcccctggccgcgctgcaggcgcttggcgaggccgcctcctgccagctgctggcgcgcgactacaccggcgccctggcggtcttcacgcgcatgcagcgcctggcgcgggagcacggcagccacccggtgcagtcactgccgccgcccccgccgccggcaccccagcccgggcccggggcgacgcccgccctaccggccgcgctgcttcctccgaactccggctcggcggcgccctctcccgccgccctgggcgccttctcggacgtgctggtccgctgcgaggtgtcccgcgtgctgctgctgctcctcctgcaaccaccgcccgccaagctgctgccggagcacgcccagaccctggagaagtactcctgggaggcttttgacagccacgggcaggagagcagcggccagcttcccgaggagctctttctgctgctccagtctttggtcatggctacccacgaaaaggacacggaagccatcaagtcgctgcaggtggagatgtggccactgttgactgctgagcagaaccacctccttcacctcgttctgcaagaaaccatctccccctcaggacagggagtctgatccatcccattcacccagtgacttctttttgcccaggcctggactttttgcatcagtcacgttaaccagatgactttgcctgttaccaaacctcatgcatccacgtttgcgtctggggaggaataaaaagacatcgttcccgcttctgcgttttgttattcctactgccgccataggaattatttcgttggctgaacgttaccagcaccccgagaacacattttgatagaatcagagtagaggacatggctgtcttctaaaaagccacgacatgaaaatgacaatccctttcgtctccttcctccgctgcttccacctaacgcagcctcctgcctccgcctttgtttcatagtgaggattttattttgcacggcgccctccctctaaatacctaccctagatgatttcatcctgcccctcacttcttaacatattcctgtgtctttgtaatggccaaatttctccttccactcgtccgcacggtacgtcttcatgggagtcattttattccttacagcttccttgtaaccacagccctaaatccatgataaagctactcttgtactcctcaaaaaaaaaaaaaaaaaaa

SEQ ID NO: 218 - DNA, 6646 bp, Homo sapiens
attcattactcacggctagatcgtttactttggttgtcccttctggcatggtgcatatgttatgggaagagggattataatttggtgctgtttgtagagatgacaacactgataaaatccactcattgctggtcccagcacacctggaaagttctgcaaggcctcagctacagaaagcccagagacagaaagtaaactctttcatgacccttgatcatcagatcatcaatccaactcttaaatggtcacaacctgcagtgccaagtggtgggcctcttgtgcagcatgcacacacaactctggacagtgatgctggcctcacagaaaacccactcaccaagttactagctattgggaaagaagatgacaatgcacaatggcatatggaggacgttattgaggatataatcggtatggaatcaagttttaaagaggaaggagcagactctcctctgctaatgcaaagaacattatctggaagtattttggatgtgtatagcggtgaacaaggaatttcaccaattaacatggggcttacaagtgcttcttgtccaagtagtctaccaatgaaaagagaaattacagaaactgacactagagctttagcaaaagagagacaaaaaaaggacaaccacaacctcattgaaagaagaagaaggtataatattaattaccgaatcaaggagcttggcactcttattccaaagtctaatgatcctgatatgcgctggaacaaaggaaccattctaaaagcatcagtggagtacatcaagtggctacaaaaagaacaacagagagcccgagaattggaacacagacagaagaaattagagcaggctaacaggcgacttctacttcggattcaggaactagaaattcaggctcgtactcatggtctgccaaccctggcttcacttggcacggttgatttaggtgctcatgtcaccaaacagcagagccatcctgagcagaattcagtagactattgccaacaactgactgtgtctcaggggccaagccctgagctctgtgatcaagctatagccttttctgatcctttgtcatacttcacagatttatcatttagtgctgcattgaaagaggaacaaagattggatggcatgctattggatgacacaatctctccatttggaacagatcctctgctatctgccacttcccctgcagtttccaaagaaagcagtaggagaagtagctttagctcagatgatggtgatgaattataagaaataaacagacccaattcatcaactggaaagcaattctatgctggtgctatgcaattatgctctgtgtttcatatgttgctttggcttattttttttcttaaaggaatgtgttgttcatgaaaaactgatagaagcaacagaagaattcgcaggaagaaaaatcatagtgttaatgaattattgagggcgaaaaaaaggtgttttcttctttgactacggagtccaaatccacttaaattctgttttcctgaaaagaggtacagcataagaaatagctctttattgatgttttaaaagcagcaacttggtggtgtactactggaactaatgactgcaaagtgttaaacgactgaaatatacaaacagtctcttagttactcatttccatcttctcttcaactttcacatcagtcttccggaatcaagatcaacatatcaggtggtcattgcctttctccattgtctagtagacatgtctaaagttcaaactttataggataaataaatgtataatagattatctgtcacttgtggttgaaaggcaaatctacaataaatgtgagaattttccacaataaaatatggataacttataaaaacattggttactaaaattagatcctcattttattgtagttggttcaattacactaattctaaaagcatccatgcatatttatatctccagtctctgttcaggaaaaggaacatattgaatattttcctcaggaatatggaccagaattgtatcccttcacacaaacatacacatacacatatgcacatcattcaggtagtatatgttcttttgttttcttcatgcttctgactgcatcagaatcacattccaaattctcttttcttatgaagaagagatgtcagatcatcaattttagtaaataaaatataaaatgtccccctgcaaggacagttttcaggtacttaaaacttttcatcagtattggacagaaatcaattagttgttgatttggtttttctccaaatggataaaatattgaaaattgaattgccaattgacaaaataattattacaacaaactatttcttattattttcagttctgagaggaacgtaaggttctatttctataaacacttagagtgtcctatgatctttggttgcactgttagcatttattataagcacttataactatgatgcttcatttagatttttatctcttgcgcttgttttaggttaggaaattaagttaccaagcacgttgctctgtgctggacctccaagagtgatcatccgatcaatgagtattcatggaggcatactcagaactgcagtgagtcctgagaaaatgtagaagagttgaaaaagatatggtcttactcctaaggtagttaatgagaatgcatgaaaaacaaaaacaaaagatagaagacatatagaataaaaaatctaagcataaactgtaaatacagaaggtcagagaaaatgaaaatgactgacaaactttatgggaacagcagaatttgacttctctttgaaaggcattaattgagtgaaagtgagggcatataaaggaataataccaaccaaatgataaaagtgagaataataggggaagtatctttataggactttaattagaaagatctggatgccctagaagatgtctgttggggagttctgaagcataagactgacaacaggttgtgaaggcccttagaaaactatggtgaaataatatagtattaatataatagaaacaaatctttttagtagcagggaggatgctaaaaactaaaatatatattactaatgagtgagatgtaatctttcatgaatattaagctttgggataaattttgaaaggatcttttagttgcttctcacatggaaaatatgtcactatgaaatgtgagaccctaatgctgataaaagtagaaaaatagtaaatcattatggtataataattatctcaggcttagcttgtatcatttgctcagaatttggagaattaaaataattttattgtttgacatggaaaaataattactaacttctgggtacagtcattaaagcctgatagataaattcatctgaaatatgccatgtgaaacagctattagatacatcttctcaataattttcaagacgatattacatacttttaattttataacaaaattccacttcattatctgagttgataatttgattaaatgttaaaaattatagataaggaatatattttggagttcatagaaaacacaccactttattagatagagactggcttcagttctcattttatctgctcttctcatttcttcatattttgagtagacttgcactgatgatgtcattactcagtcattattttctgttctgttaaggtacaactactgggccttgaaatctatccttcacaatcttggctgagataaggacttggcacaggatgatagagcctggacacaagagatctggagagggaactgctatttgctgctacattcagattatgagatgtcagggaactgtaaaaagggtaatgaatttttaaagagagtaaagagttatgctgtgtcccggtcaactgaaatacattaaaaattaattagatggtagttcttaactttttaaggcagataccttgagaatctagtgagttatagaccctctccctagaaaagtatagaactgtttatatggacaataattcacatgcattcagagatcttagggatctcctgaatgttttcttggatcccaagtgaaaaattcctgaatcaggtctcttaggtgtgcggttaatgtcatgtataacaatggggggacccttacttatctaaatataattatcccaatcctaataatgatgaggttgcataggaaagtaatagtgtaccaaactttagattattcactaaaaaagttgttcatttatgaagtagtcgtttatcaaacatgtcctccccactcagcaaactatgccttctatttattatatatgggtcagtttcactataattactgagtgttataaacatctgaccataacattttgaaatgatgcaaataaatttccaaacaaaaatagtgtgaatttaaaagcaaattatttgagtatctaagaaacaagatagacttctagaaaaatttgactctctagaatatttcttgcagaaatgagatttttcataatagtaaaagaggcatatgtttatcaaacaatgctgtcacaaaaagcatcaactgtaatgggactattaatgcataattattgatttattcattcaattaatatacaattatcccttttcatttaaagatttaattcataattacaattataataaaacttcctttaaagtaagatacaataattttattgtttttcattcttttttcaacaaaatatcccatccaatcattttttatattattaaatattggctgctttttcttggattcacattaaacagccctttccaacttccaattgtcttaaaataatgatgacctcctgtgagtagatacagctctttacaatttttttctttagtgccttttcttcttgaatttttcctatatcaaatggagaatatatgtacagatggtattttctcagtttataggcatatcagtgaccatggctttctttatataggtttttaaaaaagccctaaataataaatagccagatgagctggggacattgagaaatagccttcctcttcctttttcaactcatttttttcccacctacatgactgtaaatcaaatatttaatagctcttacttaaaaaaacagatacaaagaatgtcttgatttggtgtgctcatttaccataatgtcatgaggggaattagatttcacaactttaaaaggaatatatttttattttattttgaaaaactgagtcatataggaattttcttatacttcaaggcatcatggaaacacttttttcctgtttggatattgtggaatttaaacgttcaaataaataaatggcataactaagtgttccaaatttttttacaatgtctttgaccctattcaaacactttaggtatttactgaccgtctgatgtgtaagatgtggaataaaactggaatcaattaattatttcactgtgttatcagcgcaagatcaaccatctgggtttcttaaagacacccgaaggattgaattttgtttcagtattgataatggcatagtctctatgtgctacatggaattacatcatttatccctccagtgccctatatgttgataagtatgtcagtttgacttagtatacatatatacagagatttcattacatttacctaataaatacaaaatacatttcgagtgttactgatctcctatgttacatgagcctcctgtaatcattgtgcattgatgttccaatgttttattgtttgtatgaattttaatttgaaaacaaggaaacaatccaaaagcagaaaaaatagcttttcttaaaattttcagtgctacattttccctctgaggtccatagagatttgaatgtataggagattatccgaaaacagctattttgattaaaaaatatatctcccaggattcaaccaacttaatgatgaagtactattgtctactgctttatacataaaagggaactttttatctgcttgtaaagggatttttatgtgtatttctgcataatcagatgacttctattgtgttttctactgatgaaattctctgtaaaatgtctttttcttacattatccaacaggcataaagaataacagtaaagacttttgtgtttgtaatactacctcttttatccctgcactactgttttattgcaaaaattctatattgtcactgtattttttccatagaatataaattttgttcttgtgctaaagctggtagtttatgtagcagacaaaatatacaaataaaagaagagactgattttgctgaaagaattatatataatcaagaagttacatattgttctttaaatatgatactgaattttaaaagcaaacgaaattcaagaatcttatctaacagcatagcagttgcttatggcatacaaggctaaaattaattcagctatttaatcttaataattattatgtagttaaaaatctttgactttaatagtgttttacatatacaaatagctgaagtaacattcctataattttaatctgacattggttagatcaagaaaacattgttaataagactgtagaatttgtaattattgctatttttcatttttaataacaaagtaatgtgtcttattttctaagaaaatggagaactttggtgtactttaatacatacaaaaatctttgtaaaaataccttaaaatgtaccaatattttctttgcatatattaaatgaaagactataattatgaaa

SEQ ID NO: 219 - DNA, 2409 bp, Homo sapiens
gaggtggtggcgccagcggctacctcctgcctgtgaggagctggctgagaggggactgggcgccggcggggaaggaggagcgctaggtcggtgtacgaccgagattagggtgcgtgccagctccgggaggccgcggtgaggggccgggcccaagctgccgacccgagccgatcgtcagggtcgccagcgcctcagctctgtggaggagcagcagtagtcggagggtgcaggatattagaaatggctactccccagtcaattttcatctttgcaatctgcattttaatgataacagaattaattctggcctcaaaaagctactatgatatcttaggtgtgccaaaatcggcatcagagcgccaaatcaagaaggcctttcacaagttggccatgaagtaccaccctgacaaaaataagagcccggatgctgaagcaaaattcagagagattgcagaagcatatgaaacactctcagatgctaatagacgaaaagagtatgatacacttggacacagtgcttttactagtggtaaaggacaaagaggtagtggaagttcttttgagcagtcatttaacttcaattttgatgacttatttaaagactttggcttttttggtcaaaaccaaaacactggatccaagaagcgttttgaaaatcatttccagacacgccaggatggtggttccagtagacaaaggcatcatttccaagaattttcttttggaggtggattatttgatgacatgtttgaagatatggagaaaatgttttcttttagtggttttgactctaccaatcagcatacagtacagactgaaaatagatttcatggatctagcaagcactgcaggactgtcactcaacgaagaggaaatatggttactacatacactgactgttcaggacagtagttcttattctattctcactaaatccaactggttgactcttcctcattatctttgatgctaaacaattttctgtgaactattttgacaagtgcatgatttcactttaaacaatttgatatagctattaaatatatttaagggttttttttttttgacaaattcaacattcaacgagtagacaaaatgctaattatttccctgattaggaaagtttctttaaaaaacacgtaattttgcctagtgctttttctctacctgcccttgggctcactaatatcaccagtattattaccaagaaaatattgagtttacctgattaaactttaaaagttaattgtagatttaaattgtgtgaacctaatgatttttgcagtgaaacctttactaattcaaagttgcatgttctatgacatctgtgacttgcgttgcagagtgtacatgaaactgtataattgagtcattcagtaaaggagaacagtatcttggttaattgctactgaaaggttgagaaaggaatggtttgatatttaccacagcgctgtgcctttctacagtagaactggggtaaaggaaatggttttattgcccatagtcatttaggctggaaaaaagttgaaaacttaacgaaatattgccaagagattgttatgtgtttggttccagcctaaaaatgattttgtagtgttgaaatcatagctacttacatagctttttcatatttctttcttagttgttggcactcttaggtcttagtatggatttatgtgtttgtgtgtgtgtagtttatcctctctctcatctttatctagagattgactgatacctcattctgtttgtaaaaccagccagtaatttctgtgcaaccttactatgtgcaatatttttaaatcctgagaaatgtgtgcttttgttttcggatagacttatttctttagttctgcacttttccacattatactccatatgagtattaatcctatggatacatattaaaacaagtgtctcatacaacattgtatgtgagagaaatataaatatttacaacctgatattcgttgttgttttattgttaaaagtttattatgcaactctggaggtatagagggcatataagctatgggacatatgctgatcacaggctatattcatgaagttacttttgaccaacctgaaaactgataggattttgtttgtcatttggtaatttctactgcattcttaccatccttctctcacaaattttgatagcttgaagatctttttaattataattttgttgtatttgtttcctaggagcaagtgttcctgctgccagttctttcctctttaggcgtggttgagaaaaagcagaaactttacataaagctgtatttcttaatcatctttaatttgaaacttaagaaaatgaatttattctgttatatttatgtaacttatttcctggaagttatatctactagttttgtttgataataataaaattagctataccttgaa

SEQ ID NO: 220 - DNA, 4029 bp, Homo sapiens
agtttctgagcgctcggcatctgattcaatctccagtttcctgttcttgctggggctggggtctctcctttaacaaagacacgccgcgcggccgagtccaggggctgcagaggcctggcgcgcgcacgcgcacgcgcacgcccaccgcgcggcttcccgcggtccccggtgctgaggagagagcgatccgagggactgcgccgcccggacggcctgcagagcgctgccatcatgagtgaaattcgtaaggacaccttgaaggccattctgttggagttagaatgtcattttacatggaatttacttaaggaagacattgatctgtttgaggtagaagatacaattgggcaacagcttgaatttcttaccacaaaatctagacttgctctttataacctattggcctatgtgaaacacctaaaaggccaaaataaagacgcccttgagtgcttggaacaagcagaagaaataatccagcaagaacactcagacaaagaagaagtacgaagcctggtcacttggggaaactatgcctgggtgtattatcacatggaccagcttgaagaagctcagaagtatacaggtaagatagggaatgtctgtaagaaattgtccagtccttctaactacaagttggagtgtcctgagactgactgtgagaaaggctgggcactcttgaaatttggaggaaagtattatcaaaaggctaaagcggcttttgagaaggctctggaagtggagcctgacaatccagaatttaacatcggctatgctatcacagtgtatcggctggatgattctgatagagaagggtctgtaaagagcttttctctggggcctttgagaaaggctgttaccctgaacccagataacagctatattaaggtttttctggcactgaagcttcaagatgtacatgcagaagctgaaggggaaaagtatattgaagaaatcctggaccaaatatcatcccagccttacgtccttcgttatgcagccaagttctataggagaaaaaattcctggaacaaagctctcgaacttttaaaaaaggccttggaggtgacaccaacttcttctttcctgcatcaccagatgggactttgctacagggcacaaatgatccaaatcaagaaggccacacacaacagacctaaaggaaaggataaactaaaggttgatgagctgatttcatctgctatatttcatttcaaagcagccatggaacgagactctatgtttgcatttgcctacacagacctggccaacatgtacgctgaaggaggccagtatagcaatgctgaggacattttccggaaagctcttcgtctggagaacataaccgatgatcacaaacatcagatccattaccactatggccgctttcaggaatttcaccgtaaatcagaaaatactgccatccatcattatttagaagccttaaaggtcaaagacagatcaccccttcgcaccaaactgacaagtgctctgaagaaattgtctaccaagagactttgtcacaatgctttagatgtgcagagtttaagtgccctagggtttgtttacaagctggaaggagaaaagaggcaagctgctgagtactatgagaaggcacaaaagatagatccagaaaatgcagaattcctgactgctctctgtgagctccgactttccatttaaatacatactctaggaaattagctctaagtttttcccttcattttgggttctcctgtttgttttttttttattattttaatcccttgtttattatagagctaatatttattgaatagttattgtgtaccaagcattgtgctaaatactttatatgcattatgatgaatcttgtgcggttttctttctttttttctttttaattaaaatactataatccattgagaaatagcaatattctagctattgtaacttctaaaaatggtatggccattagatctgtgctttttatctctgctctttgaatttctcatattatatagtaaatatattcctacgtaaacctttgatacctagatcaggaatactcttccaggagtacaaaattacattattgatagttaagctcttaattgtgtagcttgcaaaagacagcactttttagttacagatgttttgactttgatgaggatatttagctatcaatctaatagtcacctaaaatatcttttttgttggaaaaaagtttataataaaaaagtttgtcatctctagtgacttcaataaagaaaaaactagaagaggagaaaaaggatttcctcaaattttaaatatgtaacttcagggattcaatccccaaatgtttattaagtagctagaaataattatgtggaaaaaaatgaataatggaaaatagtgagtctcaaattgttctctttttttttttaactaaaacaaatctgcaatgaatctagatgcaattaattttattccttccaactaaaattacaatatttttaggttaaaattattgagatataaagcagccattgggaaattgggagaaatgataaacaaatggaaaaagaagatgtccctaacctacacccatagattaccaaggtttcagtgtactagttttgaatctgttctgaatggagtttttataccctcaatttctggcctttggctattttagcatttcaaagtgacttctatgaagctttttttttaatgtgaaattttcagaatgttgtttttttcatgtagatactccaggaagagttaagcactgctttcagttttaatatccaccttgaggggtcgctgcttgagggctcttatcccaggggactttttaattcggatgttacttaatgtggcttctctaatgtagtttctttgattaccgactacacaattatgtaccatcacagtattagtggaaaagtaccatgtgatttaattctccattcctccaatgtaactcttaaaattattatgtatgtgtgtgtgttttactttttgttttttatcatctttaaaatttctattatggtttgattattataaaaataatgaattctcactgtaaatttcaaaaaaaaattacaaaagtatgtgaatttaaaaatgagagcagtcctctcaccctaccacagttccacaccctcaaggtaaacttataacttataatttgatatgtaaacttccagatcttttttctatgcgtaatcagacatacatatatactgcagtgtatctcacgtattaatttttaaaaatcttttgttttacttaattctgtttttattattattattattttgtttgatctattaaggaagaacaaggaagggaatgatctttactcaagaatttcagaaagtcagcactgaagtcctgacctatcagtagacacatttgtccctttcagatattttaggatattctagcaaagcaggccatttctcccacctgaaagtacataacttctatcacttgccacataattaaaagaactcacattaagcggttactcagacagttaatcatagaaaagattatttgcttcatcagttcatagaaaagattatttgcttcatcagttaacttgtttttataaatcagggctgtgttcatacacagaaggggcctgagatttctgcactttaaacaagctcctcctaggtgaggatgctgtggctgttctaattacattttgagtagtaaggtctacagcattgttcctcaaacttggctacgtattggaatcacctaaaaagttaaaacaaaacatggatgtctgggtcccgccccatagagaatgacttaattggcatggggtgcagtccaggcatcatgatttttagatttcccagttggaacttgtgcagcaaagtttgggagctactgatggacatgtgaaaagtaagtataaatggaataaaattaattaggctaataggcttaacccaggaaatcctaagttccttgaatatccagtttgcatttggactcctcatcatatacttggtatataatactctaataaaagctgcctgagttgaa

SEQ ID NO: 221 - DNA, 1336 bp, Homo sapiens
gaggaagtgacgacaggcgtgcccttgacaggcagggagggctaggctgtgcatccctccgctcgcattgcagggagatggctcagcgacttcttctgaggaggttcctggcctctgtcatctccaggaagccctctcagggtcagtggccacccctcacttccagagccctgcagaccccacaatgcagtcctggtggcctgactgtaacacccaacccagcccggacaatatacaccacgaggatctccttgacaacctttaatatccaggatggacctgactttcaagaccgagtggtcaacagtgagacaccagtggttgtggatttccacgcacagtggtgtggaccctgcaagatcctggggccgaggttagagaagatggtggccaagcagcacgggaaggtggtgatggccaaggtggatattgatgaccacacagacctcgccattgagtatgaggtgtcagcggtgcccactgtgctggccatgaagaatggggacgtggtggacaagtttgtgggcatcaaggatgaggatcagttggaggccttcctgaagaagctgattggctgacaagcagggatgagtcctggttcccttgcccgcgtgggaccccaatagaactcagcccttccatgccagcccttcctgctgcctccctcctgtctggctcctggggcccatgcttagagcccaggctccagccctgagtgcttccgagctggcggactgcccaggggccatcagaggatggtggtgctgctgctgatccggggaccgctgtcttccctcccatacgcctttcatccctccttctagggcctatggcagttctcccaggatgtgtggcgagagcctgggccagcccacagcgttcctagtcaggcagccacaccttggtcctcatcttggtcccttccaatctgaaacctcgtgcctggctcgtctgccacctacatttctctttccagctgctgttttgtaaaaagaaaaagaaaaaagaagcccaaactagtgagagtaatatctaattatctcattttttgtaggtctgtgataaagaacttagtcatcccttccacctcctactgtgaagaacagaccctgggtcccacactgaaatcccctctagtcacccattcccaccccccagggagctgcctcccaggcagggggtgcagaaaatgattgatgggctggggaaccctggagagcctcgactccggaagtctcaaggtgcctcctcctctccttagctggcccgttggttttctgagcagggggctgaactgtgaacaagtcagacaaataaagcaagggtctgcaccatc

SEQ ID NO: 222 - DNA, 4282 bp, Homo sapiens
tgggcaccgaggggtcccggggtccgcggatctcgggtggggtttttccctctcagtggcacttggttgagttcccccgggacttctgaagttccggcccgcgctggacttctgggattccctcttccgtaaataggaatccgaggaatgaatgaatcaatgaatgaatgaataaacgaaccaactcggccacttggcccgggcctcctttctcctctggtcgtggggaaggagggatgggttggaccttctgcttttctttcaattccctcttttcattctccttcctcctcaatcttcaacacttggctagtcgttaatgccttaagtgcttaatttgttgtgtctggtcctggccagggtctggctgtacaggaggactggaagggcatcctgggagtttcctggtgtccacaggccggacaaaagcaaccccgactccttagagcatggcatggctcagaggtgctggtaaaactgatgggggtttttgctgtccctcccctcagcgccgacaccatgtggatccaggttcggaccatggacgggaggcagacccacacggtggactcgctgtccaggctgaccaaggtggaggagctgaggcggaagatccaggagctgttccacgtggagccaggcctgcagaggctgttctacaggggcaaacagatggaggacggccataccctcttcgactacgaggtccgcctgaatgacaccatccagctcctggtccgccagagcctcgtgctcccccacagcaccaaggagcgggactccgagctctccgacaccgactccggctgctgcctgggccagagtgagtcagacaagtcctccacccacggtgaggcggccgccgagactgacagcaggccagccgatgaggacatgtgggatgagacggaattggggctgtacaaggtcaatgagtacgtcgatgctcgggacacgaacatgggggcgtggtttgaggcgcaggtggtcagggtgacgcggaaggccccctcccgggacgagccctgcagctccacgtccaggccggcgctggaggaggacgtcatttaccacgtgaaatacgacgactacccggagaacggcgtggtccagatgaactccagggacgtccgagcgcgcgcccgcaccatcatcaagtggcaggacctggaggtgggccaggtggtcatgctcaactacaaccccgacaaccccaaggagcggggcttctggtacgacgcggagatctccaggaagcgcgagaccaggacggcgcgggaactctacgccaacgtggtgctgggggatgattctctgaacgactgtcggatcatcttcgtggacgaagtcttcaagattgagcggccgggtgaagggagccccatggttgacaaccccatgagacggaagagcgggccgtcctgcaagcactgcaaggacgacgtgaacagactctgccgggtctgcgcctgccacctgtgcgggggccggcaggaccccgacaagcagctcatgtgcgatgagtgcgacatggccttccacatctactgcctggacccgcccctcagcagtgttcccagcgaggacgagtggtactgccctgagtgccggaatgatgccagcgaggtggtactggcgggagagcggctgagagagagcaagaagaaggcgaagatggcctcggccacatcgtcctcacagcgggactggggcaagggcatggcctgtgtgggccgcaccaaggaatgtaccatcgtcccgtccaaccactacggacccatcccggggatccccgtgggcaccatgtggcggttccgagtccaggtcagcgagtcgggtgtccatcggccccacgtggctggcatacacggccggagcaacgacggagcgtactccctagtcctggcggggggctatgaggatgatgtggaccatgggaattttttcacatacacgggtagtggtggtcgagatctttccggcaacaagaggaccgcggaacagtcttgtgatcagaaactcaccaacaccaacagggcgctggctctcaactgctttgctcccatcaatgaccaagaaggggccgaggccaaggactggcggtcggggaagccggtcagggtggtgcgcaatgtcaagggtggcaagaatagcaagtacgcccccgctgagggcaaccgctacgatggcatctacaaggttgtgaaatactggcccgagaaggggaagtccgggtttctcgtgtggcgctaccttctgcggagggacgatgatgagcctggcccttggacgaaggaggggaaggaccggatcaagaagctggggctgaccatgcagtatccagaaggctacctggaagccctggccaaccgagagcgagagaaggagaacagcaagagggaggaggaggagcagcaggaggggggcttcgcgtcccccaggacgggcaagggcaagtggaagcggaagtcggcaggaggtggcccgagcagggccgggtccccgcgccggacatccaagaaaaccaaggtggagccctacagtctcacggcccagcagagcagcctcatcagagaggacaagagcaacgccaagctgtggaatgaggtcctggcgtcactcaaggaccggccggcgagcggcagcccgttccagttgttcctgagtaaagtggaggagacgttccagtgtatctgctgtcaggagctggtgttccggcccatcacgaccgtgtgccagcacaacgtgtgcaaggactgcctggacagatcctttcgggcacaggtgttcagctgccctgcctgccgctacgacctgggccgcagctatgccatgcaggtgaaccagcctctgcagaccgtcctcaaccagctcttccccggctacggcaatggccggtgatctccaagcacttctcgacaggcgttttgctgaaaacgtgtcggagggctcgttcatcggcactgattttgttcttagtgggcttaacttaaacaggtagtgtttcctccgttccctaaaaaggtttgtcttcctttttttttttatttttatttttcaaatctatacattttcaggaatttatgtattctggctaaaagttggacttctcagtattgtgtttagttctttgaaaacataaaagcctgcaatttctcgacaaaacaacacaagattttttaaagatggaatcagaaactacgtggtgtggaggctgttgatgtttctggtgtcaagttctcagaagttgctgccaccaactctttaagaaggcgacaggatcagtccttctctcgggttctggcccccaaggtcagagcaagcatcttcctgacagcattttgtcatctaaagtccagtgacatggttccccgtggtggcccgtggcagcccgtggcatggcgtggctcagctgtctgttgaagttgttgcaaggaaaagaggaaacatctcgggcctagttcaaacctttgcctcaaagccatcccccaccagactgcttagcgtctgagatccgcgtgaaaagtcctctgcccacgagagcagggagttggggccacgcagaaatggcctcaaggggactctgctccacgtggggccaggcgtgtgactgacgctgtccgacgaaggcggccacggacggacgccagcacacgaagtcacgtgcaagtgcctttgattcgttccttctttctaaagacgacagtctttgttgttagcactgaattattgaaaatgtcaaccagattctagaaactgcggtcatccagttcttcctgacaccggatgggtgcttgggaaccgtttgagccttatagatcatttacattcaatttttttaactcagcaagtgagaacttacaagagggtttttttaaaatttttttttctcttaatgaacacattttctaaatgaattttttttgtagttactgtatatgtaccaagaaagatataacgttagggtttggttgtttttgtttttgtattttttttcttttgaaagggtttgttaatttttctaattttaccaaagtttgcagcctatacctcaataaaacagggatattttaaatcacatacctgcagacaaactggagcaatgttatttttaaagggtttttttcacctccttattcttagattattaatgtattagggaagaatgagacaattttgtgtaggctttttctaaagtccagtactttgtccagattttagattctcagaataaatgtttttcacagatagaaaaaaaaaaaaaaaaaaaaaaaaaaaaaaa

SEQ ID NO: 223 - DNA, 5169 bp, Homo sapiens
attccgggcggccgctccctccgtcccctctctcccttccccaaagcagcccgcggaccggcagcaaaggaacgtgcgaacgcgtgacgccgcccgactggctcgcgctctcccgtgccccggcgtcctccgcccgctcatggcccgggccgccgcggacgagcggcgctgaggcgggccgcgtggagacgtgaggcggccgccgtggccctcacagtcggcgtttcgccgcctgcccgcggtgcccgcgcacgccggccgccatcgccttcgcgcctggctggcgggggcgctgtcctcccaggccgtccgcgccgctccctggagctcggcggagcgcggcagccagggccggcggaggcgcgaggagccgggcgccaccgccgccgccgccgccgccgccgcgggggccatgaccgtggagcagaacgtgctgcagcagagcgcggcgcagaagcaccagcagacgtttttgaatcaactgagagaaattacggggattaatgacacccagatactacagcaagccttgaaggatagtaatggaaacttggaattagcagtggctttccttactgcgaagaatgctaagacccctcagcaggaggagacaacttactaccaaacagcacttcctggcaatgatagatacatcagtgtgggaagccaagcagatacaaatgtgattgatctcactggagatgataaagatgatcttcagagagcaattgccttgagtttggccgaatcaaacagggcattcagggagactggaataactgatgaggaacaagccattagcagagttcttgaagccagcatagcagagaataaagcatgtttgaagaggacacctacagaagtttggagggattctcgaaacccttatgatagaaaaagacaggacaaagctcccgttgggctaaagaatgttggcaatacttgttggtttagtgctgttattcagtcattatttaatcttttggaatttagaagattagttctgaattacaagcctccatcaaatgctcaagatttaccccgaaaccaaaaggaacatcggaatttgccttttatgcgtgagctgaggtatctatttgcacttcttgttggtaccaaaaggaagtatgttgatccatcaagagcagttgaaattcttaaggatgctttcaaatcaaatgactcacagcagcaagatgtgagtgagtttacacacaaattattagattggttagaagatgccttccaaatgaaagctgaagaggagacggatgaagagaagccaaagaaccccatggtagagttgttctatggcagattcctggctgtgggagtacttgaaggtaaaaaatttgaaaacactgaaatgtttggtcagtacccacttcaggtcaatgggttcaaagatctgcatgagtgcctagaagctgcaatgattgaaggagaaattgagtctttacattcagagaattcaggaaaatcaggccaagagcattggtttactgaattaccacctgtgttaacatttgaattgtcaagatttgaatttaatcaggcattgggaagaccagaaaaaattcacaacaaattagaatttccccaagttttatatttggacagatacatgcacagaaacagagaaataacaagaattaagagggaagagatcaagagactgaaagattacctcacggtattacaacaaaggctagaaagatatttaagctatggttccggtcccaaacgattccccttggtagatgttcttcagtatgcattggaatttgcctcaagtaaacctgtttgcacttctcctgttgacgatattgacgctagttccccacctagtggttccataccatcacagacattaccaagcacaacagaacaacagggagccctatcttcagaactgccaagcacatcaccttcatcagttgctgccatttcatcgagatcagtaatacacaaaccatttactcagtcccggatacctccagatttgcccatgcatccggcaccaaggcacataacggaggaagaactttctgtgctggaaagttgtttacatcgctggaggacagaaatagaaaatgacaccagagatttgcaggaaagcatatccagaatccatcgaacaattgaattaatgtactctgacaaatctatgatacaagttccttatcgattacatgccgttttagttcacgaaggccaagctaatgctgggcactactgggcatatatttttgatcatcgtgaaagcagatggatgaagtacaatgatattgctgtgacaaaatcatcatgggaagagctagtgagggactcttttggtggttatagaaatgccagtgcatactgtttaatgtacataaatgataaggcacagttcctaatacaagaggagtttaataaagaaactgggcagccccttgttggtatagaaacattaccaccggatttgagagattttgttgaggaagacaaccaacgatttgaaaaagaactagaagaatgggatgcacaacttgcccagaaagctttgcaggaaaagcttttagcgtctcagaaattgagagagtcagagacttctgtgacaacagcacaagcagcaggagacccagaatatctagagcagccatcaagaagtgatttctcaaagcacttgaaagaagaaactattcaaataattaccaaggcatcacatgagcatgaagataaaagtcctgaaacagttttgcagtcggcaattaagttggaatatgcaaggttggttaagttggcccaagaagacaccccaccagaaaccgattatcgtttacatcatgtagtggtctactttatccagaaccaggcaccaaagaaaattattgagaaaacattactagaacaatttggagatagaaatttgagttttgatgaaaggtgtcacaacataatgaaagttgctcaagccaaactggaaatgataaaacctgaagaagtaaacttggaggaatatgaggagtggcatcaggattataggaaattcagggaaacaactatgtatctcataattgggctagaaaattttcaaagagaaagttatatagattccttgctgttcctcatctgtgcttatcagaataacaaagaactcttgtctaaaggcttatacagaggacatgatgaagaattgatatcacattatagaagagaatgtttgctaaaattaaatgagcaagccgcagaactcttcgaatctggagaggatcgagaagtaaacaatggtttgattatcatgaatgagtttattgtcccatttttgccattattactggtggatgaaatggaagaaaaggatatactagctgtagaagatatgagaaatcgatggtgttcctaccttggtcaagaaatggaaccacacctccaagaaaagctgacagattttttgccaaaactgcttgattgttctatggagattaaaagtttccatgagccaccgaagttaccttcatattccacgcatgaactctgtgagcgatttgcccgaatcatgttgtccctcagtcgaactcctgctgatggaagataaactgcacactttccctgaacacactgtataaactctttttagttcttaacccttgccttcctgtcacagggtttgcttgttgctgctatagtttttaacttttttttattttaataactgcaaaagacaaaatgactatacagactttagtcagactgcagacaataaagctgaaaatcgcatggcgctcagacattttaaccggaactgatgtataatcacaaatctaattgattttattatggcaaaactatgcttttgccaccttcctgttgcagtattactttgcttttatcttttctttctcaacagctttccattcagtctggatccttccatgactacagccatttaagtgttcagcactgtgtacgatacataatatttggtagcttgtaaatgaaataaagaataaagttttatttatggctacctatgtgtttgtaagcaggtatattgtatattagtgtattagtaatactagataaatgaattttgtctggggattaagattggatagttaatagattaatacaatcttttaattctgctctaatgctagcaaattggaaaatgtttaagtctttgacacttaaatttatctatatttttaacaaagttcttgaacttagtatggcaccggaacctgttttgaattcagtcaggtttttactcaagtaagtggttgattttttttaagtcaaactacactgaaacttttatccttttcttagattaatcttactttttaaatgtatttacaatatacagcaaggtgattatttcaagagaatcccaaagtacttgaataagggctattgtaaaatttaaaagaaatatttatatatacacatatatacacatacacacatgtatatatatattcttcataatggaggacaatgttttgcaatatataaatcattctatttttgtaaattgtatatcactttaattgaaaatgttctctactaattaatactgtgaaacaaaattgatgttgtttaactagaagttatgagtatcttaactgcctttattccttttcaaaaaggaaaaagctgtagaacattttgtagatgaaactactgtttaagattaatgaattaatattgtgaatgaaaatcaaaatccatactttaaaggtaatcatgttactaacaacctatttttgaattcataaaaatttctttataaatgatgttttgtgaacatagtaaaatagaccattatactatgtgtatgtttgatacagcgtcgccaaaactagtgttctttattagtgcctctcacaaaagatcctggatggaggagtaagatgaaatattatgctattatatgatgctgtttgtaaaggtattaatgtactagtaaggtgttaatgacaaggaattagtactattcctgttgtaaagttagattttgcatattgtatctatcaaaatatgtttgggtttagattttaagttgtctactgagcagatttctgcattggttttccagtcctgttaaaagtttagaaacttcatatgtgtcatcacagcttttgtaaagaaagtatccttaatattttatgacattctaccaca

SEQ ID NO: 224 - DNA, 6860 bp, Homo sapiens
gccttttccccttccttgccctgggagaaatcctcccttcactgggagagaacttctctcccagggcggtgcgacccggagctccagcgccctagtctccacttcgtttgctgaaacttgctttctaccagctaagaaccatgctgcgagtgattgtggaatctgccagcaatatccctaaaacgaaatttggcaagccggatcctattgtttctgtcatttttaaggatgagaaaaagaaaacaaagaaagttgataatgaattgaaccctgtctggaatgagattttggagtttgacttgaggggtataccactggacttttcatcttcccttgggattattgtgaaagattttgagacaattggacaaaataaattaattggcacggcgactgtagccctgaaggacctgactggtgaccagagcagatccctgccgtacaagctgatctccctgctaaatgaaaaagggcaagatactggggccaccattgacttggtgatcggctatgatccgccttctgctccacatccaaatgacctgagcgggcccagcgtgccaggcatgggaggagatggggaagaagatgaaggtgatgaagacaggttggacaatgcagtcaggggccctgggcccaaggggccagttgggacggtgtcggaagctcagcttgctcggaggctcaccaaagtaaagaacagccggcggatgctgtcaaataagccacaggacttccagatccgcgtccgagtgattgagggccgacagttaagtggtaacaacataaggcctgtggtcaaagttcacgtctgtggccagacacaccgaacaagaatcaagagaggaaacaaccctttttttgatgagttgtttttctacaatgtcaacatgaccccttctgaattgatggatgagatcatcagcatccgggtttataattctcactctctgcgggcagattgtctgatgggggaatttaagattgatgttggatttgtttatgatgaacctggccatgctgtcatgagaaagtggcttcttctcaatgacccggaagataccagttcaggttctaaaggttatatgaaagtcagcatgtttgtcctgggaaccggagatgagcctcctcctgagagacgagatcgtgataatgacagtgatgatgtggagagtaatttgttactccctgctggcattgccctccggtgggtgaccttcttgctgaaaatctaccgagctgaggacatcccccagatggatgatgccttctcacagacagtaaaggaaatatttggaggcaatgcagataagaaaaatctcgtggatccttttgtagaagtttcctttgctggaaaaaaggtttgtacaaacataattgagaaaaatgcaaacccagagtggaatcaggtcgtcaatcttcagatcaagtttccttcagtgtgtgaaaaaataaaactaacaatatatgactgggaccgtcttactaaaaatgatgtagttggaacaacatatctacacctctctaaaattgctgcctctggtggggaagtggaagatttctcatcttcgggaactggggctgcatcatatacagtaaacacaggagaaacagaggtaggctttgttccaacgtttggaccttgttacctgaatctttatggaagccccagagagtacacgggattcccagacccctatgatgagctgaatactggaaagggggaaggagttgcctacagaggcaggatcttggttgaattagccacttttcttgagaagacaccaccagataaaaagcttgagcccatttcaaatgatgacctgctggttgttgagaaataccagcgaaggcggaagtacagcctgtctgccgtgtttcattcagccaccatgttgcaagatgttggtgaggccattcagtttgaagtcagcattgggaactatggcaacaagtttgacaccacctgtaagcctttggcatcaacaactcagtacagccgtgctgtatttgatggcaactactattattacttgccttgggcccacaccaagccagttgttaccctgacttcatactgggaggatattagtcatcgcctggatgcggtgaacactctcctagctatggcagaacggctgcaaacaaatatagaagctctaaaatcagggatacaaggtaaaattcctgcaaaccagctggctgaattgtggctgaagctgatagatgaagttatagaagacacgagatacacgttgcctctcacagaaggaaaagccaacgtcacagttctcgatactcagatccgaaagctgcggtccaggtctctctcccaaatacatgaggcggctgtgaggatgaggtcggaagccacagatgtgaagtccacactggcagaaattgaggactggcttgataaattaatgcagctgactgaagagccacagaacagcatgcctgacatcatcatctggatgatccggggagagaagagactggcctatgcacgaattcccgcacatcaggtcttgtactccaccagtggtgagaatgcatctggaaaatactgtgggaaaacccaaaccatctttctgaagtatccacaggagaaaaacaacgggccaaaggtgcctgtggagttgcgagtgaacatctggctaggcttaagtgctgtggagaagaagtttaacagcttcgcagaaggaactttcaccgtctttgctgaaatgtatgaaaatcaagctctcatgtttggaaaatggggtacttctggattagtaggacgtcataagttttctgatgtcacaggaaaaataaaactcaagagggaattttttctgcctccaaaaggctgggaatgggaaggagagtggatagttgatcctgaaagaagcttgctgactgaggcagatgcaggtcacacggagttcactgatgaagtctatcagaacgagagccgctaccccgggggcgactggaagccggccgaggacacctacacggatgcgaacggcgataaagcagcatcacccagcgagttgacttgtcctccaggttgggaatgggaagatgatgcatggtcttatgacataaatcgagcggtggatgagaaaggctgggaatatggaatcaccattcctcctgatcataagcccaaatcctgggttgcagcagagaaaatgtaccacactcatagacggcgaaggctggtccgaaaacgcaagaaagatttaacacagactgcttcaagcaccgcaagggccatggaggaattgcaagaccaagagggctgggaatatgcttctctaattggctggaaatttcactggaaacaacgtagttcagataccttccgccgcagacgctggaggagaaaaatggctccttcagaaacacatggtgcagctgccatctttaaacttgaaggtgcccttggggcagacactaccgaagatggggatgagaagagcctggagaaacagaagcacagtgccaccactgtgttcggagcaaacacccccattgtttcctgcaattttgacagagtctacatctaccatctgcgctgctatgtctatcaagccagaaacctcttggctttagataaggatagcttttcagatccatatgctcatatctgtttcctccatcggagcaaaaccactgagatcatccattcaaccctgaatcccacgtgggaccaaacaattatattcgatgaagttgaaatctatggggaaccccaaacagttctacagaatccacccaaagttatcatggaactttttgacaatgaccaagtgggcaaagatgaatttttaggacgaagcattttctctcctgtggtgaaactgaactcagaaatggacatcacacccaaacttctctggcacccagtaatgaatggagacaaagcctgcggggatgttcttgtaactgcagagctgattctgaggggcaaggatggctccaaccttcccattcttccccctcaaagggcgccaaatctatacatggtcccccaggggatcaggcctgtggtccagctcactgccattgagattctagcttggggcttaagaaatatgaaaaacttccagatggcttctatcacatcccccagtcttgttgtggagtgtggaggagaaagggtggaatcggtggtgatcaaaaaccttaagaagacacccaactttccaagttctgttctcttcatgaaagtgttcttgcccaaggaggaattgtacatgcccccactggtgatcaaggtcatcgaccacaggcagtttgggcggaagcctgtcgtcggccagtgcaccatcgagcgcctggaccgctttcgctgtgacccttatgcagggaaagaggacatcgtcccacagctcaaagcctcccttctgtctgccccaccatgccgggacatcgttatcgaaatggaagacaccaaaccattactggcttctaagctgacagaaaaggaggaagaaatcgtggactggtggagtaaattttatgcttcctcaggggaacatgaaaaatgcggacagtatattcagaaaggctattccaagctcaagatatataattgtgaactagaaaatgtagcagaatttgagggcctgacagacttctcagatacgttcaagttgtaccgaggcaagtcggatgaaaatgaagatccttctgtggttggagagtttaagggctcctttcggatctaccctctgccggatgaccccagcgtgccagcccctcccagacagtttcgggaattacctgacagcgtcccacaggaatgcacggttaggatttacattgttcgaggcttagagctccagccccaggacaacaatggcctgtgtgacccttacataaaaataacactgggcaaaaaagtcattgaagaccgagatcactacattcccaacactctcaacccagtctttggcaggatgtacgaactgagctgctacttacctcaagaaaaagacctgaaaatttctgtctatgattatgacacctttacccgggatgaaaaagtaggagaaacaattattgatctggaaaaccgattcctttcccgctttgggtcccactgcggcataccagaggagtactgtgtttctggagtcaatacctggcgagatcaactgagaccaacacagctgcttcaaaatgtcgccagattcaaaggcttcccacaacccatcctttccgaagatgggagtagaatcagatatggaggacgagactacagcttggatgaatttgaagccaacaaaatcctgcaccagcacctcggggcccctgaagagcggcttgctcttcacatcctcaggactcaggggctggtccctgagcacgtggaaacaaggactttgcacagcaccttccagcccaacatttcccagggaaaacttcagatgtgggtggatgttttccccaagagtttggggccaccaggccctcctttcaacatcacaccccggaaagccaagaaatactacctgcgtgtgatcatctggaacaccaaggacgttatcttggacgagaaaagcatcacaggagaggaaatgagtgacatctacgtcaaaggctggattcctggcaatgaagaaaacaaacagaaaacagatgtccattacagatctttggatggtgaagggaattttaactggcgatttgttttcccgtttgactaccttccagccgaacaactctgtatcgttgcgaaaaaagagcatttctggagtattgaccaaacggaatttcgaatcccacccaggctgatcattcagatatgggacaatgacaagttttctctggatgactacttgggtttcctagaacttgacttgcgtcacacgatcattcctgcaaaatcaccagagaaatgcagattggacatgattccggacctcaaagccatgaacccccttaaagccaagacagcctccctctttgagcagaagtccatgaaaggatggtggccatgctacgcagagaaagatggcgcccgcgtaatggctgggaaagtggagatgacattggaaatcctcaacgagaaggaggccgacgagaggccagccgggaaggggcgggacgaacccaacatgaaccccaagctggacttaccaaatcgaccagaaacctccttcctctggttcaccaacccatgcaagaccatgaagttcatcgtgtggcgccgctttaagtgggtcatcatcggcttgctgttcctgcttatcctgctgctcttcgtggccgtgctcctctactctttgccgaactatttgtcaatgaagattgtaaagccaaatgtgtaacaaaggcaaaggcttcatttcaagagtcatccagcaatgagagaatcctgcctctgtagaccaacatccagtgtgattttgtgtctgagaccacaccccagtagcaggttacgccatgtcaccgagccccattgattcccagagggtcttagtcctggaaagtcaggccaacaagcaacgtttgcatcatgttatctcttaagtattaaaagttttattttctaaagtttaaatcatgtttttcaaaatatttttcaaggtggctggttccatttaaaaatcatctttttatatgtgtcttcggttctagacttcagcttttggaaattgctaaatagaattcaaaaatctctgcatcctgaggtgatatacttcatatttgtaatcaactgaaagagctgtgcattataaaatcagttagaatagttagaacaattcttatttatgcccacaaccattgctatattttgtatggatgtcataaaagtctatttaacctctgtaatgaaactaaataaaaatgtttcaccttta

SEQ ID NO: 225 - DNA, 1332 bp, Homo sapiens
cccgcttagacaatgccccggagccgccagaccgtcgcgcccctgccccatcgtagtatatgagctcgcctacacaaggacccgcgctaaaagccagagctcccagtccccgaggcttgaagacggggactcccttctccaccaactctgtcctcggggggtggggccccagccgagatcacagcgcgacaggagtgggggtggccgctggagacaggtgaagaaacaagaaaactaagaaatccgagcggttggagggggagtctgtgtggatgggatggggacgccgggggaggggctgggccgctgctcccatgccctgatccggggagtcccagagagcctggcgtcgggggaaggtgcgggggctggccttcccgctctggatctggccaaagctcaaagggagcacggggtgctgggaggtaaactgaggcaacgactggggctacagctgctagaactgccacctgaggagtcattgccgctgggaccgctgcttggcgacacggccgtgatccaaggggacacggccctaatcacgcggccctggagccccgctcgtaggccagaggtcgatggagtccgcaaagccctgcaagacctggggctccgaattgtggaaataggagacgagaacgcgacgctggatggcactgacgttctcttcaccggccgggagtttttcgtaggcctctccaaatggaccaatcaccgaggagctgagatcgtggcggacacgttccgggacttcgccgtctccactgtgccagtctcgggtccctcccacctgcgcggtctctgcggcatggggggacctcgcactgttgtggcaggcagcagcgacgctgcccaaaaggctgtccgggcaatggcagtgctgacagatcacccatatgcctccctgaccctcccagatgacgcagctgctgactgtctctttcttcgtcctgggttgcctggtgtgccccctttcctcctgcaccgtggaggtggggatctgcccaacagccaggaggcactgcagaagctctctgatgtcaccctggtacctgtgtcctgctcagaactggagaaggctggcgccgggctcagctccctctgcttggtgctcagcacacgcccccacagctgagggcctggccttggggtactgctggccaggggtaggatagtataggaagtagaaggggaaggagggttagatagagaatgctgaataggcagtagttgggagagagcctcaatattgggggaggggagagtgtagggaaaaggatccactgggtgaatcctccctctcagaaccaataaaatagaattgacctttta

SEQ ID NO: 226 - DNA, 3634 bp, Homo sapiens
agttctgcgcagcttcccgaggctccgcaccagccgcgcttctgtccgcctgcagggcattccagaaagatgaggatatttgctgtctttatattcatgacctactggcatttgctgaacgcatttactgtcacggttcccaaggacctatatgtggtagagtatggtagcaatatgacaattgaatgcaaattcccagtagaaaaacaattagacctggctgcactaattgtctattgggaaatggaggataagaacattattcaatttgtgcatggagaggaagacctgaaggttcagcatagtagctacagacagagggcccggctgttgaaggaccagctctccctgggaaatgctgcacttcagatcacagatgtgaaattgcaggatgcaggggtgtaccgctgcatgatcagctatggtggtgccgactacaagcgaattactgtgaaagtcaatgccccatacaacaaaatcaaccaaagaattttggttgtggatccagtcacctctgaacatgaactgacatgtcaggctgagggctaccccaaggccgaagtcatctggacaagcagtgaccatcaagtcctgagtggtaagaccaccaccaccaattccaagagagaggagaagcttttcaatgtgaccagcacactgagaatcaacacaacaactaatgagattttctactgcacttttaggagattagatcctgaggaaaaccatacagctgaattggtcatcccagaactacctctggcacatcctccaaatgaaaggactcacttggtaattctgggagccatcttattatgccttggtgtagcactgacattcatcttccgtttaagaaaagggagaatgatggatgtgaaaaaatgtggcatccaagatacaaactcaaagaagcaaagtgatacacatttggaggagacgtaatccagcattggaacttctgatcttcaagcagggattctcaacctgtggtttaggggttcatcggggctgagcgtgacaagaggaaggaatgggcccgtgggatgcaggcaatgtgggacttaaaaggcccaagcactgaaaatggaacctggcgaaagcagaggaggagaatgaagaaagatggagtcaaacagggagcctggagggagaccttgatactttcaaatgcctgaggggctcatcgacgcctgtgacagggagaaaggatacttctgaacaaggagcctccaagcaaatcatccattgctcatcctaggaagacgggttgagaatccctaatttgagggtcagttcctgcagaagtgccctttgcctccactcaatgcctcaatttgttttctgcatgactgagagtctcagtgttggaacgggacagtatttatgtatgagtttttcctatttattttgagtctgtgaggtcttcttgtcatgtgagtgtggttgtgaatgatttcttttgaagatatattgtagtagatgttacaattttgtcgccaaactaaacttgctgcttaatgatttgctcacatctagtaaaacatggagtatttgtaaggtgcttggtctcctctataactacaagtatacattggaagcataaagatcaaaccgttggttgcataggatgtcacctttatttaacccattaatactctggttgacctaatcttattctcagacctcaagtgtctgtgcagtatctgttccatttaaatatcagctttacaattatgtggtagcctacacacataatctcatttcatcgctgtaaccaccctgttgtgataaccactattattttacccatcgtacagctgaggaagcaaacagattaagtaacttgcccaaaccagtaaatagcagacctcagactgccacccactgtccttttataatacaatttacagctatattttactttaagcaattcttttattcaaaaaccatttattaagtgcccttgcaatatcaatcgctgtgccaggcattgaatctacagatgtgagcaagacaaagtacctgtcctcaaggagctcatagtataatgaggagattaacaagaaaatgtattattacaatttagtccagtgtcatagcataaggatgatgcgaggggaaaacccgagcagtgttgccaagaggaggaaataggccaatgtggtctgggacggttggatatacttaaacatcttaataatcagagtaattttcatttacaaagagaggtcggtacttaaaataaccctgaaaaataacactggaattccttttctagcattatatttattcctgatttgcctttgccatataatctaatgcttgtttatatagtgtctggtattgtttaacagttctgtcttttctatttaaatgccactaaattttaaattcatacctttccatgattcaaaattcaaaagatcccatgggagatggttggaaaatctccacttcatcctccaagccattcaagtttcctttccagaagcaactgctactgcctttcattcatatgttcttctaaagatagtctacatttggaaatgtatgttaaaagcacgtatttttaaaatttttttcctaaatagtaacacattgtatgtctgctgtgtactttgctatttttatttattttagtgtttcttatatagcagatggaatgaatttgaagttcccagggctgaggatccatgccttctttgtttctaagttatctttcccatagcttttcattatctttcatatgatccagtatatgttaaatatgtcctacatatacatttagacaaccaccatttgttaagtatttgctctaggacagagtttggatttgtttatgtttgctcaaaaggagacccatgggctctccagggtgcactgagtcaatctagtcctaaaaagcaatcttattattaactctgtatgacagaatcatgtctggaacttttgttttctgctttctgtcaagtataaacttcactttgatgctgtacttgcaaaatcacattttctttctggaaattccggcagtgtaccttgactgctagctaccctgtgccagaaaagcctcattcgttgtgcttgaacccttgaatgccaccagctgtcatcactacacagccctcctaagaggcttcctggaggtttcgagattcagatgccctgggagatcccagagtttcctttccctcttggccatattctggtgtcaatgacaaggagtaccttggctttgccacatgtcaaggctgaagaaacagtgtctccaacagagctccttgtgttatctgtttgtacatgtgcatttgtacagtaattggtgtgacagtgttctttgtgtgaattacaggcaagaattgtggctgagcaaggcacatagtctactcagtctattcctaagtcctaactcctccttgtggtgttggatttgtaaggcactttatcccttttgtctcatgtttcatcgtaaatggcataggcagagatgatacctaattctgcatttgattgtcactttttgtacctgcattaatttaataaaatattcttatttattttgttacttggtacaccagcatgtccattttcttgtttattttgtgtttaataaaatgttcagtttaacatccca

SEQ ID NO: 227 - DNA, 878 bp, Homo sapiens
ctccgcctggacgcagcagccaccgccgcgtccctctctccacgaggctgccggcttaggacccccagctccgacatgtcgccctctggtcgcctgtgtcttctcaccatcgttggcctgattctccccaccagaggacagacgttgaaagataccacgtccagttcttcagcagactcaactatcatggacattcaggtcccgacacgagccccagatgcagtctacacagaactccagcccacctctccaaccccaacctggcctgctgatgaaacaccacaaccccagacccagacccagcaactggaaggaacggatgggcctctagtgacagatccagagacacacaagagcaccaaagcagctcatcccactgatgacaccacgacgctctctgagagaccatccccaagcacagacgtccagacagacccccagaccctcaagccatctggttttcatgaggatgaccccttcttctatgatgaacacaccctccggaaacgggggctgttggtcgcagctgtgctgttcatcacaggcatcatcatcctcaccagtggcaagtgcaggcagctgtcccggttatgccggaatcgttgcaggtgagtccatcagaaacaggagctgacaacctgctgggcacccgaagaccaagccccctgccagctcaccgtgcccagcctcctgcatcccctcgaagagcctggccagagagggaagacacagatgatgaagctggagccagggctgccggtccgagtctcctacctcccccaaccctgcccgcccctgaaggctacctggcgccttgggggctgtccctcaagttatctcctctgctaagacaaaaagtaaagcactgtggtctttgc

SEQ ID NO: 228 - DNA, 717 bp, Homo sapiens
aaacctttgcgcaggcgcagaaaggcacaggactcgctaagtgttcgctacgcggggctaccggatcggtcggaaatggcagaggtggaggagacactgaagcgactgcagagccagaagggagtgcagggaatcatcgtcgtgaacacagaaggcattcccatcaagagcaccatggacaaccccaccaccacccagtatgccagcctcatgcacagcttcatcctgaaggcacggagcaccgtgcgtgacatcgacccccagaacgatctcaccttccttcgaattcgctccaagaaaaatgaaattatggttgcaccagataaagactatttcctgattgtgattcagaatccaaccgaataagccactctcttggctccctgtgtcattccttaatttaatgccccccaagaatgttaatgtcaatcatgtcagtggactagcacatggcagtcgcttggaacccactcacaccaatccagtgaccgtgtgtgggctggcggctcttctcccccaccaacggaacccctgtgtgcaccaaccttccccagagctccggagcgccctctcctcacttccaggttttggagcaagagcttgcaggaagcccgcacccagcttccttctgaccttcagttcactttgtcgcccttggagaaagctgtttttctttaactaaaaataaccaaaatgcttaaaaaaaaaaaaaaaaaa

SEQ ID NO: 229 - DNA, 2742 bp, Homo sapiens
cttttttactgcagatttactttaaggctcatattctccaagtctattctgctttaaaaagaagacaagaaaagaagtggtttatcaaaatcacgttataatcagattttgaccaagcattttgtaagattgccaagcatgcccacggacatggaacacacaggacattacctacatcttgcctttctgatgacaacagttttttctttgtctcctggaacaaaagcaaactatacccgtctgtgggctaacagtacttcttcctgggattcagttattcaaaacaagacaggcagaaaccaaaatgaaaacattaacacaaaccctataactcctgaagtagattataaaggtaattctacaaacatgcctgaaacatctcacatcgtagctttaacttctaaatctgaacaggagctttatataccttctgtcgtcagcaacagtccttcaacagtacagagcattgaaaacacaagcaaaagtcatggtgaaattttcaaaaaggatgtctgtgcggaaaacaacaacaacatggctatgctaatttgcttaattataattgcagtgctttttcttatctgtacctttctatttctatcaactgtggttttggcaaacaaagtctcttctctcagacgatcaaaacaagtaggcaagcgtcagcctagaagcaatggcgattttctggcaagcggtctatggcccgctgaatcagacacttggaaaagaacaaaacagctcacaggacccaacctagtgatgcaatctactggagtgctcacagctacaagggaaagaaaagatgaagaaggaactgaaaaacttactaacaaacagataggttagtgaagaaaaatgcaaagtagcaatgagaaggcttatggagtaaaaatgaagtcagttggtatttaatcccaaagtgttgttctgattatctaaaatttgacatggtagaccttgcaatttagaatcaagcaggtgagacagggagaagtatgcctgcttaattatttaaactgtgtacttttgttttgacactgaatattttaaaaagcaaataataaaataactaagcatttgaggaaaattttaaggataaattgaggaaactgattaatagagatagcaagggataattaaataaatattccctatgtagcaacagtggttagatgatctttgtctgaatgtaattaaactttgaatagttttagtgtgtccttaaagccaagtatatgctttaacatcaaatggaagtcaaattcctaatgcatagatagagagagctaaactgtgtaatttaatggtatcttccttgctggatgtggcagaatccacaccagcttatcaaccaacacagctaattttagaatagatcctttatctttccatatggcacacgtaagaaagtgtttttctactattaatattaaattaaaacctttacttttgtataataaattaaaactcagaataaacctgtgaccacgtatatttgcattcactttattactttagagaacacattgtaaagatcaataagaaatagagcacaactaaaataaataagatttatagccacaccaataggctaagtgtaaacgcaaagtatgtttcactgtttatgattaataatattcatcttttctataaatactacttactggaacattaacaacaagtaccaaaggttgattaatttttggacttcaaggatgccaagtagcctaatgatttattaggggtgtgtgtgtgtgtgtgtgtgtgtgtgtgtgtgtgttcaaatctggaaaactgcatacttcaggttataatttaacctttaaagaaactggcttcaagtaaaataatgacttacatttaagttgagaacccccccatcttcaattaaatatattacaaaaattggtttgagagactttccaaatatctactgaaattaacacagggctaagatcaggccacatttcaaaaatctcatcccttactgggcatttatttcgggcaatatagtaaccattttaaaaatattttttatatgttttttcccaagtatgactacaatcttactctcccttctaagctagtgattcttaccctggctgcatgtcagaatcacctgaagagtttttaaaaaacaccaatgcctaattcccatgtcttccttctgatgcaactggaatggggtgaactctaagcattggtaatttttacgtaactctcaaggtgataactgctcttggtcatcaaattcaaacgtctagctattattaaaatgagaggaaaaaaataaagcatcatttttattatcaatttattagcaatttgtaaaaaacaaatctattctctaaacgagaaatcataacaatattattccagataaagttaagtgttaacaaagtaaaaaggaaagcatgagaatattcatgccagtcatggtgactgaaatcaggttatcttttgaggggaaaaataacccagattagaaatgaaactgggcagacttcccattctgtgcaaaaattgaaaatttgagattgtgcaccagtacatccaggagtaacacaaagcactccttgaatcaagggtcataaataaacacgtgtcagagaaaattaaaagaaattaatatcatcataaaaataggaaattactttcatattcaacatactggtcaaacattttctcaccagagagcttctaccacaaggatatttaaaagaatatttaaaattcacc

SEQ ID NO: 230 - DNA, 3688 bp, Homo sapiens
gaggtgattcccaagccgcggggcggctccggtggtgcggggaaaccgaaagtgggcggcggccgcggcggggcccctggcggagacggcggcaggagctgggcccagagacgcggggacgggccgtgggcccccggaacgaggcaaagatgctggaaggagatctggtttcaaagatgctacgagctgttctgcagtctcataagaatggagtagcattaccccggctccaaggagagtacagatccttgactggagactggatccccttcaaacagctaggtttccctacactagaagcctatctgagaagtgtgccagcagtggtcaggatagagactagtagatctggagagattacctgctatgccatggcctgcacagaaactgcaagaattgctcagcttgtggctcgtcaaaggagttctaaaaggaaaaccgggcgtcaagttaattgtcagatgagagtgaagaaaaccatgccattttttctagaaggaaaaccaaaagcaaccctcagacaaccaggatttgcttcaaatttttctgttggcaaaaaacctaatccagcaccgttaagagacaaaggaaactctgttggagttaagcctgatgctgaaatgtctccttatatgctacacacaactcttggaaatgaagcattcaaagacattccagtgcaaaggcatgtgaccatgtccaccaacaacaggtttagcccaaaggcgtcccttcaaccacctttgcagatgcatctctcaagaacctctactaaggaaatgagtgataatttaaatcagactgttgaaaaacccaatgtcaagcctcctgcctcttacacttataaaatggatgaggttcaaaatcgcataaaggaaatactaaacaagcataacaatggcatttggatatctaagcttccacatttttacaaagagttatataaagaagaccttaatcaaggaattttacaacagtttgaacactggcctcatatttgcacggtggagaaaccttgcagtggtggccaagatttacttctttatccagctaagagaaagcagcttttgagaagtgaactggatactgagaaagtacctctatccccactacctggtcccaaacaaacaccaccgttgaaagggtgtccaacagttatggcaggagactttaaagaaaaagtggcagacctgctggtgaaatacacaagtggcctttgggccagtgcacttccgaaagcatttgaggaaatgtacaaagtgaaattccctgaggatgccttaaaaaatcttgcctcactttctgatgtatgcagcatagactacatttctggaaatccccagaaggccattctctatgctaaacttccattgcccactgacaaaatccaaaaggatgcagggcaagcacatggtgataatgatatcaaggctatggttgaacaagagtatttgcaggtagaagaaagcattgctgaaagtgctaatacctttatggaggacataacagttcctcctttaatgattccaactgaagcatcaccatctgtattggtggttgaactgagcaacacaaatgaagtggttatcaggtatgtgggcaaagactattctgctgctcaggaattaatggaagatgagatgaaggaatattacagtaagaatcctaagatcacaccagtccaggctgtgaatgttgggcagttgctggccgtaaatgccgaggaggacgcctggttacgggcacaggtcatctcaacagaagagaacaaaataaaggtatgctatgttgactatggttttagtgaaaatgttgaaaaaagcaaagcatacaaattaaacccgaagttttgttcactctcatttcaagctacaaaatgtaagcttgcaggcttggaagtcctaagcgatgaccctgatctagtgaaggtggttgaatctttaacttgtggaaagatctttgcagtggaaatacttgacaaagctgacattccacttgttgttctgtacgatacctcaggagaagatgatatcaatatcaatgccacctgcttgaaggctatatgtgacaagtcactagaggttcacctgcaggttgacgccatgtacacaaatgtcaaagtaactaatatttgctctgatgggacactctactgccaggtgccttgtaagggtctgaacaagctcagtgaccttctacgtaagatagaggactacttccattgcaagcacatgacctctgagtgctttgtttcattacccttctgtgggaaaatctgcctcttccattgcaaaggaaaatggttacgagtagagatcacaaatgttcacagcagccgggctcttgatgttcagttcctggactctggcactgtgacatctgtaaaagtgtcagagctcagggaaattccacctcggtttctacaagaaatgattgcaataccacctcaggccattaagtgctgtttagcagatcttccacaatctattggcatgtggacaccagatgcagtgctgtggttaagagattctgttttgaattgctcggactgtagcattaaggttacaaaagtggatgaaaccagagggatcgcacatgtttatttatttacccctaagaacttccctgaccctcatcgcagtattaatcgccagattacaaatgcagacttgtggaagcatcagaaggatgtgtttttgagtgccatatccagtggagctgactctcccaacagcaaaaatggcaacatgcccatgtcgggcaacactggagagaatttcagaaagaacctcacagatgtcatcaaaaagtccatggtggaccatacgagcgctttctccacagaggaactgccacctcctgtccacttatcaaagccaggggaacacatggatgtgtatgtgcctgtggcctgtcacccaggctacttcgtcatccagccttggcaggagatacataagttggaagttctgatggaagagatgattctatattacagcgtgtctgaagagcgccacatagcagtggagaaagaccaagtgtatgctgcaaaagtggaaaataagtggcacagggtgcttttaaaaggaatcctgaccaatggactggtatctgtgtatgagctggattatggcaaacacgaattagtcaacataagaaaagtacagcccctagtggacatgttccgaaagctgcccttccaagcagtcacagctcaacttgcaggagtgaagtgcaaccagtggtctgaggaggcttctatggtgtttcgaaatcatgtggagaagaaacctctggtggcactggtgcagacagtcattgaaaatgctaacccttgggaccggaaagtagtggtctacttagtggacacatcgttgccagacaccgatacctggattcatgattttatgtcagagtatctgatagagctttcaaaagttaattaatgactgcctctgaaaccttgacaactaattcagattttttagcaataacaaaatgtagtaggcttaaaaaaaatcttaactctgctacatggctctgactgctgtgggggattgaaaagaatatgcttatgtttgatgaaagatatttaacaagttttgttttaacagagttgacttttcaaagaaaattgtacttgaattattactataatattagaataaaaatgtttatcaatataaaa

SEQ ID NO: 231 - DNA, 2019 bp, Homo sapiens
gttcttggaaggcggtgctctgagaagccggactacgcggcagcggctcttcaaagcggagccgggagtttttgctacagttttcgccaccatgagtcgcagctataatgatgagctgcagttcttggagaagatcaataaaaactgctggaggatcaagaagggcttcgtgcccaacatgcaggttgaaggtgttttctatgtgaatgatgctctggagaaattgatgtttgaggaattaaggaatgcctgtcgaggtggtggtgttggtggcttcctgccagccatgaaacagattggcaatgtggcagccctgcctggaattgttcatcgatctattgggcttcctgatgtccattcaggatatgggtttgctattgggaacatggcagcctttgatatgaatgaccctgaagcagtagtatccccaggtggtgtcgggtttgacatcaactgtggtgtccgcttgctaagaaccaatttagatgaaagtgatgtccagcctgtgaaggagcaacttgcccaagctatgtttgaccacattcctgttggggtggggtcaaaaggtgtcatcccaatgaatgccaaagacttggaggaggccttggagatgggggtggactggtccttaagagaagggtatgcctgggctgaagacaaggagcactgcgaggagtacggaaggatgctgcaggctgaccccaataaagtttctgcaagggcgaagaaaagaggccttcctcagttggggaccctgggagcaggcaaccattatgcagaaatccaggttgtggatgagattttcaatgagtatgctgctaaaaaaatgggcatcgaccataagggacaggtgtgtgtgatgatccacagtggaagcagaggcttgggccaccaagtagccacagatgcgctggtagctatggagaaggccatgaagagagacaagattatagtcaatgatcggcagttggcttgtgctcgaatcgcttccccagagggtcaagactatctgaagggaatggcagctgctgggaactatgcctgggtcaaccgctcttccatgaccttcttaacccgtcaggctttcgccaaggtcttcaacacaacccctgatgacttggacctacatgtgatctatgatgtttctcacaacattgccaaagtggagcagcatgtggtggacggaaaggaacggacactgttagtacacaggaagggatccacccgcgctttccctcctcaccatcccctcattgctgttgattaccaactcactggacagccagtgctcattggtggcaccatgggaacctgtagttatgttcttactggcactgaacagggcatgactgagacctttggaacaacctgtcatggagcgggccgtgcattgtcccgagcaaaatctcgacgtaatttagatttccaggatgtcttagacaaattggcagatatgggaattgcgatccgtgttgcctcacccaaactggttatggaagaggctcctgagtcctataagaatgtgacagatgtggtaaatacctgccatgatgctggaatcagcaagaaagccattaaactgagaccaattgctgtgatcaaaggatagaaccttggacagcagggctgcctgacaccaccaaccctctctgaagtggaagtggactgacatgctcttctgacatcagactcaaggcgggacaagttgcaaagtgtgcagctgtaactgctcacgccaaaatggctgatggggaggctgctgctttcaggggcccgtgcttgtaaaataaccttccaggaagaggcacattgcccacctttggaaagggaggaatatgccttctccttggttgttccacagagttttaggaaaatctgttagggatgggtagatgtcaaactgccttacgcagtcatactgatctttagccatcagattgatcttcttcacaccaagctctgtttacattccgagaggtgtcatgaagaaagttctgttcaataaggttttggaatgtt

SEQ ID NO: 232 - DNA, 4628 bp, Homo sapiens
gaacgtagctagctgcaagcagaggccggcatgaccaccgagcagcgacgcagcctgcaagccttccaggattatatccggaagaccctggaccctacctacatcctgagctacatggccccctggtttagggaggaagaggtgcagtatattcaggctgagaaaaacaacaagggcccaatggaggctgccacactttttctcaagttcctgttggagctccaggaggaaggctggttccgtggctttttggatgccctagaccatgcaggttattctggactttatgaagccattgaaagttgggatttcaaaaaaattgaaaagttggaggagtatagattacttttaaaacgtttacaaccagaatttaaaaccagaattatcccaaccgatatcatttctgatctgtctgaatgtttaattaatcaggaatgtgaagaaattctacagatttgctctactaaggggatgatggcaggtgcagagaaattggtggaatgccttctcagatcagacaaggaaaactggcccaaaactttgaaacttgctttggagaaagaaaggaacaagttcagtgaactgtggattgtagagaaaggtataaaagatgttgaaacagaagatcttgaggataagatggaaacttctgacatacagattttctaccaagaagatccagaatgccagaatcttagtgagaattcatgtccaccttcagaagtgtctgatacaaacttgtacagcccatttaaaccaagaaattaccaattagagcttgctttgcctgctatgaaaggaaaaaacacaataatatgtgctcctacaggttgtggaaaaacctttgtttcactgcttatatgtgaacatcatcttaaaaaattcccacaaggacaaaaggggaaagttgtcttttttgcgaatcagatcccagtgtatgaacagcagaaatctgtattctcaaaatactttgaaagacatgggtatagagttacaggcatttctggagcaacagctgagaatgtcccagtggaacagattgttgagaacaatgacatcatcattttaactccacagattcttgtgaacaaccttaaaaagggaacgattccatcactatccatctttactttgatgatatttgatgaatgccacaacactagtaaacaacacccgtacaatatgatcatgtttaattatctagatcagaaacttggaggatcttcaggcccactgccccaggtcattgggctgactgcctcggttggtgttggggatgccaaaaacacagatgaagccttggattatatctgcaagctgtgtgcttctcttgatgcgtcagtgatagcaacagtcaaacacaatctggaggaactggagcaagttgtttataagccccagaagtttttcaggaaagtggaatcacggattagcgacaaatttaaatacatcatagctcagctgatgagggacacagagagtctggcaaagagaatctgcaaagacctcgaaaacttatctcaaattcaaaatagggaatttggaacacagaaatatgaacaatggattgttacagttcagaaagcatgcatggtgttccagatgccagacaaagatgaagagagcaggatttgtaaagccctgtttttatacacttcacatttgcggaaatataatgatgccctcattatcagtgagcatgcacgaatgaaagatgctctggattacttgaaagacttcttcagcaatgtccgagcagcaggattcgatgagattgagcaagatcttactcagagatttgaagaaaagctgcaggaactagaaagtgtttccagggatcccagcaatgagaatcctaaacttgaagacctctgcttcatcttacaagaagagtaccacttaaacccagagacaataacaattctctttgtgaaaaccagagcacttgtggacgctttaaaaaattggattgaaggaaatcctaaactcagttttctaaaacctggcatattgactggacgtggcaaaacaaatcagaacacaggaatgaccctcccggcacagaagtgtatattggatgcattcaaagccagtggagatcacaatattctgattgccacctcagttgctgatgaaggcattgacattgcacagtgcaatcttgtcatcctttatgagtatgtgggcaatgtcatcaaaatgatccaaaccagaggcagaggaagagcaagaggtagcaagtgcttccttctgactagtaatgctggtgtaattgaaaaagaacaaataaacatgtacaaagaaaaaatgatgaatgactctattttacgccttcagacatgggacgaagcagtatttagggaaaagattctgcatatacagactcatgaaaaattcatcagagatagtcaagaaaaaccaaaacctgtacctgataaggaaaataaaaaactgctctgcagaaagtgcaaagccttggcatgttacacagctgacgtaagagtgatagaggaatgccattacactgtgcttggagatgcttttaaggaatgctttgtgagtagaccacatcccaagccaaagcagttttcaagttttgaaaaaagagcaaagatattctgtgcccgacagaactgcagccatgactggggaatccatgtgaagtacaagacatttgagattccagttataaaaattgaaagttttgtggtggaggatattgcaactggagttcagacactgtactcgaagtggaaggactttcattttgagaagataccatttgatccagcagaaatgtccaaatgatatcaggtcctcaatcttcagctacagggaatgagtaactttgagtggagaagaaacaaacatagtgggtataatcatggatcgcttgtacccctgtgaaaatatattttttaaaaatatctttagcagtttgtactatattatatatgcaaagcacaaatgagtgaatcacagcactgagtattttgtaggccaacagagctcatagtacttgggaaaaattaaaaagcctcatttctagccttctttttagagtcaactgccaacaaacacacagtaatcactctgtacacactgggatagatgaatgaatggaatgttgggaatttttatctccctttgtctccttaacctactgtaaactggcttttgcccttaacaatctactgaaattgttcttttgaaggttaccagtgactctggttgccaaatccactgggcacttcttaaccttctatttgacctctgcgcatttggccctgttgagcactcttcttgaagctctccctgggcttctctctcttctagttctattctagtctttttttattgagtcctcctctttgctgatcccttccaagggttcaatatatatacatgtatatactgtacatatgtatatgtaactaatatacatacatacaggtatgtatatgtaatggttatatgtactcatgttcctggtgtagcaacgtgtggtatggctacacagagaacatgagaacataaagccatttttatgcttactactaaaagctgtccactgtagagttgctgtatgtagcaatgtgtatccactctacagtggtcagcttttagtagagagcataaaaatgataaaatacttcttgaaaacttagtttactatacatcttgccctattaatatgttctcttaacgtgtgccattgttctctttgaccattttcctataatgatgttgatgttcaacacctggactgaatgtctgttctcagatcccttggatgttacagatgaggcagtctgactgtcctttctacttgaaagattagaatatgtatccaaatggcattcacgtgtcacttagcaaggtttgctgatgcttcaaagagcttagtttgcggtttcctggacgtggaaacaagtatctgagttccctggagatcaacgggatgaggtgttacagctgcctccctcttcatgcaatctggtgagcagtggtgcaggcggggagccagagaaacttgccagttatataacttctctttggcttttcttcatctgtaaaacaaggataatactgaactgtaagggttagtggagagtttttaattaaaagaatgtgtgaaaagtacatgacacagtagttgcttgataatagttactagtagtagtattcttactaagacccaatacaaatggattatttaaaccaagtttatgagttggttttttttcattttctatttgtattttattaagagtgtcttttcttatgtgattttttttaattgctatttgatatggtttggctatatgtccccacccaaatctcatcttgaattataatccccatgtgtcaagggagggacctgacgggaggtgattggatcacgggggcagttgtccccatgctgttcttgggatagtgagttagttctcatgagatctgatggttttataagtgtttgacaattcctcctttacacacactctctctctcatctgctgccatgtaagacttgcctgcttccccttctgccatgattgtaagtttcctgaggcctcctcagccatgtggaactgtgaatctattaagcctcttttctttataaatga

SEQ ID NO: 233 - DNA, 2399 bp, Homo sapiens
ataaaagcctagtggccattgtgttcgttgctcttatcggttcccatcccagttgttgatcttatgcaagacgctgcacgaccccgcgcccgcttgtcgccacggcacttgaggcagccggagatactctgagttactcggagcccgacgcctgagggtgagatgaacgcgctggcctccctaaccgtccggacctgtgatcgcttctggcagaccgaaccggcgctcctgcccccggggtgacgcgcagctcccagccgcccagacacatggccccaggccaagcaccccatcaggctaccccgtggagggatgcccaccctttcttcctcctgtccccagtgatgggcctcctcagccgcgcctggagccgcctgaggggcctgggacctctagagccctggctggtggaagcagtaaaaggagcagctctggtagaagctggcctggagggagaagctaggactcctctggcaatcccccataccccttggggcagacgccctgaagaggaggctgaagacagtggaggccctggagaggacagagaaacactggggctgaaaaccagcagttcccttcctgaagcctggggacttttggatgatgatgatggcatgtatggtgagcgagaggcaaccagtgtccctagagggcagggaagtcaatttgcagatggccagcgtgctcccctgtctcccagccttctgataaggacactgcaaggttctgataagaacccaggggaggagaaagccgaggaagagggagttgctgaagaggagggagttaacaagttctcttatccaccatcacaccgggagtgttgtccagccgtggaggaggaggacgatgaagaagctgtaaagaaagaagctcacagaacctctacttctgccttgtctccaggatccaagcccagcacttgggtgtcttgcccaggggaggaagagaatcaagccacggaggataaaagaacagaaagaagtaaaggagccaggaagacctccgtgtccccccgatcttcaggctccgaccccaggtcctgggagtatcgttcaggagaggcgtccgaggagaaggaggaaaaggcacacaaagaaactgggaaaggagaagctgccccagggccgcaatcctcagccccagcccagaggccccagctcaagtcctggtggtgccaacccagtgatgaagaggagggtgaggtcaaggctttgggggcagctgagaaggatggagaagctgagtgtcctccctgcatccccccaccaagtgccttcctgaaggcctgggtgtattggccaggagaggacacagaggaagaggaagatgaggaagaagatgaggacagtgactctggatcagatgaggaagagggagaagctgaggcttcctcttccactcctgctacaggtgtcttcttgaagtcctgggtctatcagccaggagaggacacagaggaggaggaagatgaggacagtgatacaggatcagccgaggatgaaagagaagctgagacttctgcttccacaccccctgcaagtgctttcttgaaggcctgggtgtatcggccaggagaggacacggaggaggaggaagatgaggatgtggatagtgaggataaggaagatgattcagaagcagccttgggagaagctgagtcagacccacatccctcccacccggaccagagggcccacttcaggggctggggatatcgacctggaaaagagacagaggaagaggaagctgctgaggactggggagaagctgagccctgccccttccgagtggccatctatgtacctggagagaagccaccgcctccctgggctcctcctaggctgcccctccgactgcaaaggcggctcaagcgcccagaaacccctactcatgatccggaccctgagactcccctaaaggccagaaaggtgcgcttctccgagaaggtcactgtccatttcctggctgtctgggcagggccggcccaggccgcccgccagggcccctgggagcagcttgctcgggatcgcagccgcttcgcacgccgcatcacccaggcccaggaggagctgagcccctgcctcacccctgctgcccgggccagagcctgggcacgcctcaggaacccacctttagcccccatccctgccctcacccagaccttgccttcctcctctgtcccttcgtccccagtccagaccacgcccttgagccaagctgtggccacaccttcccgctcgtctgctgctgcagcggctgccctggacctcagtgggaggcgtggctgagaccaactggtttgcctataatttattaactatttattttttctaagtgtgggtttatataaggaataaagccttttgatttgtagcgaaaaaaaaaaaaaaaaa

SEQ ID NO: 234 - DNA, 2935 bp, Homo sapiens
gccatagcaggctgctgtctcacagagcgagaaggtgtcaggagcagcccagttgtgtctctctctctacctctgtgaagggcgcgaatgggcagagcagaacttctagaagggaagatgagcacccaggatccctcagatctgtggagcagatccgatggagaggctgagctgctccaggacttggggtggtatcacggcaacctcacacgccatgctgctgaagctcttctcctctcaaatggatgtgacggcagctaccttctgagggacagcaatgagaccaccgggctgtactctctctctgtgagggccaaagattctgttaaacactttcatgttgaatatactggatattcatttaaatttggctttaatgaattctcatctttgaaggattttgtcaagcattttgcaaatcagcctttgattggaagcgagacaggcactctgatggttctaaaacatccctacccaagaaaagtggaagaaccctccatttatgaatctgtccgggttcacacagcaatgcagacaggaagaacagaagatgaccttgtgcccacagcaccttctctgggcaccaaagaaggttacctcaccaaacagggaggcctggtcaagacctggaaaacaagatggtttactctgcacaggaatgaactgaaatacttcaaagaccagatgtcaccagaaccaattcggatcctagacctaacagaatgttcagctgtacaattcgattattcacaagaaagggtaaactgtttttgtttggtatttccattcaggacattttatctctgtgcaaagaccggagtagaagctgatgagtggatcaagatattacgctggaaattgtcacaaataagaaaacagctcaaccaaggggaaggcacgatccgatctcggtcgttcatctttaaatagatctttcttgccaaggaatgctctggcccaggagcaaggtggaatgtttccctgacgctgtgatctgcagcaggcttcaaatgaaaaccgactaaggattttctttcaaaaacaaatcagaagcagatgctgattgggacccatataccacgttgctgactcacgttgctgcccttccatgatgttgccatctccttgagaacactgaagcaatcaccattctgatagaaagtgcttaaaccaccactcttaggtctgctcactcttagaacacacaatggaagaggaagggtttttgttttcactcattgtggtccccaagcctattgacactagttgcctagagtcccactgtgagtcatggtcagcctgtctgacatccaggttgtgctattaaccaagaaggaaacagatacttggaggcttagatgacttctgcaggatttatattcagatagaaaacatcaaatattttcaggggagaggtttttttttttaatttttccccctttatacaaaaaaaaaagaacatttccaaaactaaaatagaaaatgcttgtggcatttattttctctttttaaaaggttcagaaatttggcaggtcctttgcttctaatgacaaaactgtgagagctagatgtcctatgggcaattaggtagtataataaaggtaaatgaaggtacaatttttaaaccattattttcaccctgttggggtaaatgttttaaagagtgagaaaacataaattgagaaagggtgataaagtaatagataacttttagtttaataataattattgttattatactactaataatagagcacttgtaagcactaagttatctttatccaacatttctccaaatggactgaaagaaacttttcaaggacagtgtattataacaatccctttcccagaattagttgtatagggttggcccaagagatgtaagaaaaatctcgcattgctccctaagcaccctgggccttattaaagagcaacttctatttccagtcgggggagtaacactaaagctacaagaaatatgtaataatgataggtaataatgtgttccaaagctttttcaaactagaataaggaggcaaatagaagaatgagatactgatgtccacagttcattggcagaatctaaccccttctgttatcttttttaatactatttttgtttagatagaagtttcaaagaagataaaaatgcttgaagagcctgagagtaaaaagattatgctgcaaagctatgatataaactgctcttgcagtccaaagggatacctgattaaagaagtttcttatttaaacatctcagacgcaaaaattacattaaatttttgtatatttcaacaacattttaaatgtattttgttatgtttgtattatataggataaagcaaatgtcaagttaaaatgtattgtgttgtttgtaaagtaagaagttactggccaggagcggcggctcatgcctgtaatcccaggactttggtaggccaagacaagcagatcacttgaggtcaggagttcaacatcagcctggccaacatgatgaaaccttgtctttactaaaaatacaaaaattagctgggcatggtggcaggcgcctgtaatcccagctactcaggaggctgaggcaggagaattgcttgaacccgggaggtggaggttgcagtgaaccaagatcgcggcgctgcactctagcctgggtgacagagtcagactccgtcccaaaaaaacaaacaaacaaaacaaaacaaaaaaaaacagaagttacaaatgaatactcacggatatgtatagttttatgtttgttttcttagaaacaaatgtgtttctttgggtgggtaatattgtgttttactatgtttaccttttataaaacataacctgtttatttatattctttggctttgtttattaaaaagcatgattttgctgtgcatgtaccattttgctattaaaatttatttttaatatttgtaacttgaaa

SEQ ID NO: 235 - DNA, 3196 bp, Homo sapiens
acaggtaggtttctctggcaccgattcggggcctgcccggacttcgccgcacgctgcagaacctcgcccagcgcccaccatgccccggcagctcagcgcggcggccgcgctcttcgcgtccctggccgtaattttgcacgatggcagtcaaatgagagcaaaagcatttccagaaaccagagattattctcaacctactgcagcagcaacagtacaggacataaaaaaacctgtccagcaaccagctaagcaagcacctcaccaaactttagcagcaagattcatggatggtcatatcacctttcaaacagcggccacagtaaaaattccaacaactaccccagcgactacaaaaaacactgcaaccaccagcccaattacctacaccctggtcacaacccaggccacacccaacaactcacacacagctcctccagttactgaagttacagtcggccctagcttagccccttattcactgccacccaccatcaccccaccagctcatacaactggaaccagttcatcaaccgtcagccacacaactgggaacaccactcaacccagtaaccagaccacccttccagcaactttatcgatagcactgcacaaaagcacaaccggtcagaagcctgttcaacccacccatgccccaggaacaacggcagctgcccacaataccacccgcacagctgcacctgcctccacggttcctgggcccacccttgcacctcagccatcgtcagtcaagactggaatttatcaggttctaaacggaagcagactctgtataaaagcagagatggggatacagctgattgttcaagacaaggagtcggttttttcacctcggagatacttcaacatcgaccccaacgcaacgcaagcctctgggaactgtggcacccgaaaatccaaccttctgttgaattttcagggcggatttgtgaatctcacatttaccaaggatgaagaatcatattatatcagtgaagtgggagcctatttgaccgtctcagatccagagacaatttaccaaggaatcaaacatgcggtggtgatgttccagacagcagtcgggcattccttcaagtgcgtgagtgaacagagcctccagttgtcagcccacctgcaggtgaaaacaaccgatgtccaacttcaagcctttgattttgaagatgaccactttggaaatgtggatgagtgctcgtctgactacacaattgtgcttcctgtgattggggccatcgtggttggtctctgccttatgggtatgggtgtctataaaatccgcctaaggtgtcaatcatctggataccagagaatctaattgttgcccggggggaatgaaaataatggaatttagagaactctttcatcccttccaggatggatgttgggaaattccctcagagtgtgggtccttcaaacaatgtaaaccaccatcttctattcaaatgaagtgagtcatgtgtgatttaagttcaggcagcacatcaatttctaaatactttttgtttattttatgaaagatatagtgagctgtttattttctagtttcctttagaatattttagccactcaaagtcaacatttgagatatgttgaattaacataatatatgtaaagtagaataagccttcaaattataaaccaagggtcaattgtaactaatactactgtgtgtgcattgaagattttattttacccttgatcttaacaaagcctttgctttgttatcaaatggactttcagtgcttttactatctgtgttttatggtttcatgtaacatacatattcctggtgtagcacttaactccttttccactttaaatttgtttttgttttttgagacggagtttcactcttgtcacccaggctggagtacagtggcacgatctcggcttatggcaacctccgcctcccgggttcaagtgattctcctgcttcagcttcccgagtagctgggattacaggcacacactaccacgcctggctaatttttgtatttttattatagacggggtttcaccatgttggccagactggtcttgaactcttgacctcaggtgatccacccacctcagcctcccaaagtgctgggattacaggcatgagccattgcgcccggccttaaatgttttttttaatcatcaaaaagaacaacatatctcaggttgtctaagtgtttttatgtaaaaccaacaaaaagaacaaatcagcttatattttttatcttgatgactcctgctccagaatcgctagactaagaattaggtggctacagatggtagaactaaacaataagcaagagacaataataatggcccttaattattaacaaagtgccagagtctaggctaagcactttatctatatctcatttcattctcacaacttataggtgaatgagtaaactgagacttaagggaactgaatcacttaaatgtcacctggctaactgatggcagagccagagcttgaattcatgttggtctgacatcaaggtctttggtcttctccctacaccaagttacctacaagaacaatgacaccacactctgcctgaaggctcacacctcataccagcatacgctcaccttacagggaaatgggtttatccaggatcatgagacattagggtagatgaaaggagagctttgcagataacaaaatagcctatccttaataaatcctccactctctggaaggagactgaggggctttgtaaaacattagtcagttgctcatttttatgggattgcttagctgggctgtaaagatgaaggcatcaaataaactcaaagtatttttaaatttttttgataatagagaaacttcgctaaccaactgttctttcttgagtgtatagccccatcttgtggtaacttgctgcttctgcacttcatatccatatttcctattgttcactttattctgtagagcagcctgccaagaattttatttctgctgttttttttgctgctaaagaaaggaactaagtcaggatgttaacagaaaagtccacataaccctagaattcttagtcaaggaataattcaagtcagcctagagaccatgttgactttcctcatgtgtttccttatgactcagtaagttggcaaggtcctgactttagtcttaataaaacattgaattgtagtaaaggtttttgtaataaaaacttactttgga

SEQ ID NO: 236 - DNA, 1653 bp, Homo sapiens
agttggagggaggcagggaatctggcttgattggcgtgctgagacgcacctggcgcaaccctcccttctgaatcgaagttcaagtcccgcggacactgcaaccatgaaggagagacgggccccccagccagtcgtggccagatgtaagctcgttctggtcggggacgtgcagtgtgggaagaccgcgatgttgcaagtgttagcgaaggattgctatccagagacctatgtgcccaccgtgttcgaaaattacacagcctgtttggagacagaggaacagagggtggagcttagtctctgggatacctcaggatctccctactacgataatgtccgtccactctgctacagcgactcggatgcagtattactatgttttgacatcagccgtccagagacagtggacagcgcactcaagaagtggaggacagaaatcctagattattgtcccagcacccgcgttttgctcattggctgcaagacagacctgcgaacagacctgagtactctgatggagctgtcccaccagaagcaggcgcccatctcctatgagcagggttgtgcaatagcaaagcagctgggtgcagaaatctacctggaaggctcagctttcacctcagaaaagagcatccacagcatctttcggacggcatccatgctgtgtctgaacaagcctagcccactgccccagaagagccctgtccgaagcctctccaaacgactgctccacctccccagtcgctctgaactcatctcttctaccttcaagaaggaaaaggccaaaagctgttccattatgtgaagtggaaattggaggggggagacaaccccctacttcctcccttggggtgcagaggcacggggagagggaggatgagacaatttaggacactggacatgagtttttcagatggccacggtgagggcttggaaggagacaggaatggggcgaggaaggagccaggcccggcatgaggacctgacgctgagagagaaccatcataccccaagccaggcactagattttggagggggcgactaccccagtgccccccccgctccagaggaaggaaagctgtgggggacggggggcatgctggcctcatgggcttgggggcctacagcagcctcaccttcagcttcatgcctcttccacacagcgtttccatgcaggtcaggggatgggaggggtccctgagcccttcccttcccctctaaggaggcagcaacggagagtggggaagtggagcggcagctcccttgggggcttagcccaggtgcttcgtaactgcaatcggaagtgcaggagctggtcagagccaatgagaaggaaacctcatctttgcatagcccatgcctcatggagaggtgacatcatacattcacatgcttctcacctaagtccccagggtccaagggagaagccccagacccccttctcttgcagagtgtgggggtggtggtgctgcaggggcagggctgggtgggggtcaccagactttttctgcccttagggtagtacagctggcatttgttttatagactcttgtctttggaattggggggagggggggagtgtttcaatctgttatatgttctgtgtttaatgaagaaaacctatttattaatgaaaaatataatacatataaagaa

SEQ ID NO: 237 - DNA, 2738 bp, Homo sapiens
agtggcttctgcgggcttcgaggagcgggatgttgcgggctgggtggctccggggcgcggcggcgctggcgctgctgctggcggcccgagtggtggcggcgttcgagcccatcaccgtgggcctagccatcggggccgcgtcggccatcaccggctacctgtcctacaatgacatctactgccgcttcgccgagtgctgccgcgaggagcggccgctcaacgcttcggctctcaagctggatttggaggagaagctgtttggacagcatctagccacggaagtgattttcaaggcgctgactggcttcaggaacaacaaaaatcccaagaaaccactgaccctttccttacacggctgggctggcacaggcaagaattttgtcagtcaaattgtggctgaaaatcttcacccaaaaggtctgaagagtaactttgtccacctgtttgtatcgactctgcacttccctcatgagcagaagataaaactgtaccaggaccagttacagaagtggatccgcggtaatgtgagtgcatgtgcgaactctgttttcatatttgacgagatggataaattgcaccccgggatcattgacgcaatcaagccgtttctagactactacgagcaggttgacggagtgtcttaccgcaaagccatcttcatctttctcagcaatgcaggcggggaccttataactaagacggctcttgacttttggcgggccggaagaaagagggaagacattcagctgaaggacctggaacctgtactgtctgtcggagtcttcaataataaacacagtggcctgtggcacagtggactgatcgacaaaaacctcattgattactttatccccttcctgcctttggagtacagacatgtgaaaatgtgtgtgagggccgagatgagggcccgtggttctgccatagatgaagacattgtcacaagagtggcagaggaaatgacgtttttccccagagacgagaaaatctactcagacaagggctgcaagactgtgcagtcgcggctggatttccactgagctcctatccagatggggtaggagacagctgggaggctccgcacgccagaggccttgcctttcagaagaaccctgaagaccgctttggggttttgcctgtttgcaccttagacttttgggtatagaatcttttttttgagaagaggtctcactccgtcatccaagctggagtgcagtggtgcaatcctcaactcactgcaacctccgctcccggtttgagtgattctcatgcctcagcctcccgagtagctgggattacaggcatgagccactgtgcccagctgggatatagaatctaagagttgattgtggaaaacacgtgaatctattgcgcgcatttgtcatttagcaagatggcagcagtccagctgttctttgcagctggagatgaacttttaaaaatccccttcacacttaatgtactgaccgagacagaagtacctgaaaacagctgtgcatggcaggcccggcaatagcttctgacccacagcacccgcgcctcagaagctacggtcacaactaaaggagtccagggacttgctgcaggctggggggcactgggtggttctcaccagcaggctgcggggcactgtgttctcattggccaaaaacatccttttgctctgtctcgttctttacacagagttcactgacttgaagtatactcagttaaaatcggggctggaggtgcagacggtgtctgaccggaggatgtggccgtgcccgccgagcactcttgatctgagctgacctgtgtgtgtgtgtgtgggggggtggggccttcacctaagacctctgcagcagacctggacagacaggcccctcccgcctgtccatcgctctagctgctaatacagccctggctgtggaatccttcaccgtctcagctggtatcagccccagcctgccttgtgccatatctcagcttggatctctgctagagtccccccaaccatatatcatagagttgaatcacaatgagaccgttggctttgaatttgagtcgttggttcccatggtgagatgcttgttaagactttatacttgggtcaatctctcactttattttgtagaaccatttgaaatcctaggatgtgcttgttctggaaggatgacatgggcccagactgaacaagtcagcttgatgatcttaaatgatggaagtataggacgttgcttattttaaaacaagggaaggacacaaaatggaatgactgcttagtcctttctcagatactcttaaaacaattttttattgttaaatttgtggtaatacatggtcacaaccgtggatcaaacaaggtcagtctaaagtggcaggtcctaggtgtgacctgataccaccaccctttgtggcagcaccgggctggactgccctgatccctgggacgtgagacttagcttccagccagtgtgaatcattgtatctgtctcataatcacagcacagctgcagacacaacaacgtgcagcattttttacataaaaatatggtagaattaatttatgacatggaaatgccttacgtggtatcacacttagtcttgaaaaaaacaccaaggtgacgtttaaaatttttagtacatatcctcaaattggagctaagttatacttcttttataaccttttgggcatctggtcgagagaagacaagattttctctatttacagtgaggcaataaatatgtttgccaccttt

SEQ ID NO: 238 - DNA, 2644 bp, Homo sapiens
actttaaagagggctgctcaactgcaaggacgctgtaagcaggaagagaagccacagcgcttcagaaaagagtgggacagggacaagcatatctaagaggctgaacatgaatccacagatcagaaacccgatgaaggcaatgtatccaggcacattctacttccaatttaaaaacctatgggaagccaacgatcggaacgaaacttggctgtgcttcaccgtggaaggtataaagcgccgctcagttgtctcctggaagacgggcgtcttccgaaaccaggtggattctgagacccattgtcatgcagaaaggtgcttcctctcttggttctgcgacgacatactgtctcctaacacaaagtaccaggtcacctggtacacatcttggagcccttgcccagactgtgcaggggaggtggccgagttcctggccaggcacagcaacgtgaatctcaccatcttcaccgcccgcctctactacttccagtatccatgttaccaggaggggctccgcagcctgagtcaggaaggggtcgctgtggagatcatggactatgaagattttaaatattgttgggaaaactttgtgtacaatgataatgagccattcaagccttggaagggattaaaaaccaactttcgacttctgaaaagaaggctacgggagagtctccagtgaggggtctccctgggcctcatggtctgtctcctctagcctcctgctcatgctgcacgggcctcccctccaccctggacccgctctgtttctgcctggtcatcctgagcccctcctggcctcagggccattccacagtgctcccctgcctcaccgcttcctcctcgctcttccagactcttcctgcagaggctcctttctgcctccatggctatccatccacccccacagaccccgttcctccagcctgcgtgcccctaacctggcttttcccatctccccagcataaccaaatcttactaaactcatcctaggctgggcatggtgactcacgcctgtaatcccccagcaatttgggaggcaaaggtgggagaatcgcgtgagcccaggagttccagaccaggctgggtcacatgacaaagccccatctctacaaaaaaaaaaaaaaaaaaaaaaaaaaagccagatgtggtggcatgcatctgtagtccaagctacttgggaggctgaagtgggaggattacttgagcccgagaggtggaggctggagtgaacagagatcgcgccactgaactcgggtctgggcaacagatagagaccctgcctgaaaataaatcgataaataaactcaacctaaacaggtgtgaatatatgtaagttgaaaacccgaagttttgagaaacatcctttgtaaatttcatcctatgaattgggtcattcatgtcctacccagctaaaacagaggccaggagccagggaggaaaagcagtcaggccacacaacattgtttccgaaatggacttctctgcaagcctgactcctgagactgtgcattgtaccctgaaaccagctttatccatagcttctgcgataaatggctgtaagtcttggactccttgctccaaacgcagcgactcagcaatagaacctcccagctcccagcccttcctagtgcccatgggctttacatagggcaagagaacatttctccttctataattgccatctctttgctctctcaacatggtgaacaccatccggactccgtgtatgtctcaaattacaattctttctttgcaaatgaaatatgaaatttagaggctcttctaaacactttaaatttgatttgacattttcaaagcagatgtaagttttagagaatgagattctccataaaaatgaccctttcatgctgtggcctccatagaagatgtcccaggccaggtgcccacatggcaggcatttattttctcacagatctggaagctgcaggtccaacttcgaggggtgggtggggttgtttcctctgaggccgctccttctggctggcagggagtctcttccagccgtgtcctctgtggcctttcctctatgcacacgcacctctgggatctctctgcctccaaatatcatcttttttttttttttttttttttttgagacagagtgttgctcctcttgtccaggctggaatgcaatggcacaatctggactcactgcaacctccgcctcccgagtttaagcgattcttctgcttcagcctcccgagtaaaaggcatgcatcaccacacctggttaattttgtagttttagtagagatggggtctcaccatgttggccagactggtctcgaactcctgacctcaggtgatccgcctgtctcagcctctccaagtgctgggattacaggcatcagccactatgcccggctgggatcatatgttccacacatgtttgttcaataagcatggactgcaaccacctacatgaatattcatagctcctcctgtagcctgttgaatatgtatgtttagccaacctcttcagcataaagctcctgcccaaacccctcctgctcctaaatgtctgtctctggtgttaaccagaggctgctcttcccaggctgctggatggctaccttgcaggctgtcacccttaacaagaaataaagtgtcctttgcaaatgca

SEQ ID NO: 239 - DNA, 1269 bp, Homo sapiens
attctaaccgcaaggagtagcggaggggaggtcgtgatggcggcgccggaggcggaggttctgtcctcagccgcagtccctgatttggagtggtatgagaagtccgaagaaactcacgcctcccagatagaactacttgagacaagctctacgcaggaacctctcaacgcttcggaggccttttgcccaagagactgcatggtaccagtggtgtttcctgggcctgtgagccaggaaggctgctgtcagtttacttgtgaacttctaaagcatatcatgtatcaacgccagcagctccctctgccctatgaacagcttaagcacttttaccgaaaaccttctccccaggcagaggagatgctgaagaagaaacctcgggccaccactgaggtgagcagcaggaaatgccaacaagccctggcagaactggagagtgtcctcagccacctggaggacttctttgcacggacactagtaccgcgagtgctgattctccttgggggcaatgccctaagccccaaggagttctatgaactcgacttgtctctgctggccccctacagcgtggaccagagcctgagcacagcagcttgtttgcgccgtctcttccgagccatattcatggctgatgcctttagcgagcttcaggctcctccactcatgggcaccgtcgtcatggcacagggacaccgcaactgtggagaagattggtttcgacccaagctcaactatcgagtgcccagccggggccataaactgactgtgaccctgtcatgtggcagaccttccatccgaaccacggcttgggaagactacatttggttccaggcaccagtgacatttaaaggcttccgcgagtgaatgagtgcttcttaatcctaaaaacacaatggctgaattatctttctccatgtggcgctgaatcacccatctggtttggagctagagttgcttcctggtgagagaggaagcaactctccttctggttgtctgcctcccctcagatttcctgataggctgatggcatgtggctgtgactgtgactgtaatcattgctgaacaacatctctttgaatcaaaggttgattttcccagagggtgctgggtcaggcatttctattaggagttggaaagcaaaaatgggtccatagacactctatggaggtgtccctttctgctctttgctgtgtcctttcagaatttttaccaggaacataatgtggatgtgacttatgaacttaaatataaaataaatagattcttattata

SEQ ID NO: 240 - DNA, 2881 bp, Homo sapiens
aagtttgaatttcgtggaggctcgggttgtgagggttcctgcttcggagtcggcggtggtcgtccagaccgagtgttctttactttttgtttggttgaggtttcacgctagaaggtggctcaggatgtcttcatcacattttgccagtcgacacaggaaggatataagtactgaaatgattagaactaaaattgctcataggaaatcactgtctcagaaagaaaatagacataaggaatacgaacgaaatagacactttggtttgaaagatgtaaacattccaaccttggaaggtagaattcttgttgaattagatgagacatctcaagggcttgttccagaaaagaccaatgttaagccaagggcaatgaaaactattctaggtgatcaacgaaaacagatgctccaaaaatacaaagaagaaaagcaacttcaaaaattgaaagagcagagagagaaagctaaacgaggaatatttaaagtgggtcgttatagacctgatatgccttgttttcttttatcaaaccagaatgctgtgaaagctgagccaaaaaaggctattccatcttctgtacggattacaaggtcaaaggccaaagaccaaatggagcagactaagattgataacgagagtgatgttcgagcaatccgacctggtccaagacaaacttctgaaaagaaagtgtcagacaaagagaaaaaagttgtgcagcctgtaatgcccacgtcgttgagaatgactcgatcagctactcaagcagcaaagcaggttcccagaacagtctcatctaccacagcaagaaagccagtcacaagagctgctaatgaaaacgaaccagaaggaaaggtgccaagtaaaggaagacctgccaaaaatgtagaaacaaaacccgacaagggtatttcttgtaaagtcgatagtgaagaaaatactttgaattcacaaactaatgcaacaagtggaatgaatccagatggagtcttatcaaaaatggaaaacttacctgagataaatactgcaaaaataaaagggaagaattcctttgcacctaaggattttatgtttcagccactggatggtctgaagacctatcaagtaacacctatgactcccagaagtgccaatgcttttttgacacccagttacacctggactcctttaaaaacagaagttgatgagtctcaagcaacaaaagaaattttggcacaaaaatgtaaaacttactctaccaagacaatacagcaagattcaaataaattgccatgtcctttgggtcctctaactgtttggcatgaagaacatgttttaaataaaaatgaagctactactaaaaatttaaatggccttccaataaaagaagtcccatcacttgaaagaaatgaaggtcgaattgctcagccccaccatggtgtgccatatttcagaaatatcctccagtcagaaactgagaaattaacttcacattgcttcgagtgggacaggaaacttgaattggacattccagatgatgctaaagatcttattcgcacagcagttggtcaaacaagactccttatgaaggaaaggtttaaacagtttgaaggactggttgatgattgtgaatataaacgaggtataaaggagactacctgtacagatctggatggattttgggatatggttagttttcagatagaagatgtaatccacaaattcaacaatctgatcaaacttgaggaatctgggtggcaagtcaataataatatgaatcataatatgaacaaaaatgtctttaggaaaaaagttgtctcaggtatagcaagtaaaccaaaacaggatgatgctggaagaattgcagcgagaaatcgcctagctgccataaaaaatgcaatgagagagagaattaggcaggaagaatgtgctgaaacagcagtttctgtgataccaaaggaagttgataaaatagtgttcgatgctggatttttcagagttgaaagtcctgttaaattattctcaggactttctgtctcttctgaaggcccttctcaaagacttggaacacctaagtctgtcaacaaagctgtatctcagagtagaaatgagatgggcattccacaacaaactacatcaccagaaaatgccggtcctcagaatacgaaaagtgaacatgtgaagaagactttgtttttgagtattcctgaaagcaggagcagcatagaagatgctcagtgtcctggattaccagatttaattgaagaaaatcatgttgtaaataagacagacttgaaggtggattgtttatccagtgagagaatgagtttgcctcttcttgctggtggagtagcagatgatattaatactaacaaaaaagaaggaatttcagatgttgtggaaggaatggaactgaattcttcaattacatcacaggatgttttgatgagtagccctgaaaaaaatacagcttcacaaaatagcatcttagaagaaggggaaactaaaatttctcagtcagaactatttgataataaaagtctcactactgaatgccaccttcttgattcaccaggtctaaactgcagtaatccatttactcagctggagaggagacatcaagaacatgccagacacatttcttttggtggtaacctgattactttttcacctctacaaccaggagaattttgaatttaaaaataaatccaaacattttccttcatattatcaatgcttatatattccttagactattgaaattttggagaaaatgtatttgtgttcacttctatagcatataatgttttaatattctgtgttcatcaaagtgtattttagatatactctttctcaagggaagtggggatattttgtacattttcaacacagaataaaaaatgtactgtg

SEQ ID NO: 241 - DNA, 4480 bp, Homo sapiens
ctgtgtcccggggagccggaggaggtggagatgaatggcgggcgcggcgaccgggagccggacccctgggaggtcggagcttgtcgagggatgcggctggcgctgcccggagcatggcgaccgcgtggctgagctcttctgtcgccgctgccgccgctgcgtgtgcgcgctttgcccggtgctgggcgcgcaccgtggccaccctgtgggcctggcgctggaggcagcggtgcacgtgcagaaactcagccaagaatgtttaaagcagctggcaatcaagaagcagcagcacattgacaacataacccagatagaagatgccaccgagaagctcaaggctaatgcagagtcaagtaaaacctggctgaaggggaaattcactgaactcagattactacttgacgaagaggaagcgctggccaagaaattcattgataaaaacacgcagcttaccctccaggtgtacagggaacaagctgactcttgcagagagcaacttgacatcatgaatgatctctccaacagggtctggagtatcagccaggagcccgatcctgtccagaggcttcaggcatacacggccaccgagcaggagatgcagcagcagatgagcctcggggagctgtgccatcccgtgcccctctcctttgagcccgtcaagagcttctttaagggcctcgtggaagccgtggagagtacattacagacgccattggacattcgccttaaggaaagcataaactgccagctctcagacccttccagcaccaagccaggtaccttgttgaaaaccagcccctcaccagagcgatcgctattgctgaaatacgcgcgcacgcccacgctggatcctgacacgatgcacgcgcgcctgcgcctgtccgccgatcgcctgacggtgcgctgcggcctgctgggcagcctggggcccgtgcccgtgctgcggttcgacgcgctctggcaagtgctggctcgtgactgcttcgccaccggccgccactactgggaggttgacgtgcaggaggcgggcgccggctggtgggtgggcgcggcctacgcctcccttcggcgccgcggggcctcggccgccgcccgcctgggctgcaaccgccagtcctggtgcctcaagcgctacgaccttgagtactgggccttccacgacggccagcgcagccgcctgcggccccgcgacgacctcgaccggctcggcgtcttcctggactacgaggccggcgtcctcgccttctacgacgtgacgggcggcatgagccacctgcataccttccgcgccacgttccaggagccgctctacccggccctgcggctctgggagggggccatcagcatcccccggctgccctaggggccaggaccggcgtgacagcctccaggtacgccgcagctgcccagtctcgcctaatctacctagatcagcgtggctggtccccttactgcctgcttcttagggccctctccctgccccagctttccccgaccaatcacgcctacagtgctttgaaggtttcctctcctaggctagtttcaaacaggccctaaacaagtctgctgctgccctctcatcagacctccgcaccctcaccccaccatcacttacactactttaatccagttccttcaaagtgatacccccacaggtaagccctcagcatcctgaatacatcatccgcagcctgggaaccttctccctcgtacagcacaggaacctgacacatagtaggcacacagtaaacgtttgtgaatgaatgggagtcatccagtcctgactcttctgtctcttgaggtcccttgaatcttccgcttcctccccaccgatttcagcgtgtccacatcacagctccctccagaagctgcaagagcttcttagcagttcctggtctgaaccctctcccagtcctcatcttccaccctaaaactagagtgatcttcctaaaacttcacttaacccctcagctatgaaaaggcttccaggagtttccatgaaataacaaaaaaaaatacaagcgcctcaccttagcattcaaggcttgtctagtctgcccaaaattacttatcctcacctagctcctaccactcttcttagagactctccagtcagaaatgtgtcgcatagttccacctccacacctctctgctgccagcacattcatgcagaaaagtcttttcacctgtctcagtcttccgcaggcttacctgcgccaggaagtctaaccaaggaacaagaatctcactatcagagccacaaatctgggacctgtctttccaactaaattggaggctttggaagggcagctttgtcctatactctctccaccctgaaaagttcccagaaagccccttccctcccaagcagtgaattaataaccagcaggtgcctatcactgagtaacagaagagctgagttaggcgggcctcacaggtcacccagccagatctcatctggggagtctgaggtcctgaaagaaagcagagctgcgtaaagttaccccggggtgatataggggggccagacgtgtgccccgttcacccacccccaggcaagcatctgacctgtcccctggcccagcccttaggcccagctttcaacctgcttactcatttctcaggggattttgggaaggaatcagcaggtgacagttgctaagcaaccaaagggggtggtgtttcccaactgtcttgggacaaaaagggtaagagcacccttagatccagatgttgccaaggaaacccagagtgcccagctgtctggaatgaagtgacagaggtagaaaacagtaggccctcacaggaggccaccttcgctagcagggagtgggaggcttctttccagggatttgtgtctccgttctgaaggttctgcgtcctgttttgtcaattccctagacggttttgaagttatattctgttaaagcatcttcataggtgcttggtgggaggccaaggtcgccgaatcctcgtggtttaaatagactttcagtgcattagtttgaaccatataaaactgacaattttcaatagtttttgagttaaaaatggcacttttgatatgagacaatgtagcagaataccaggcagacagaaccttgcaaacaccttaacttctaaccaaagactttaaaactctggctggacagagttttaagcactatgctgcaggaatcctgagaaaaaggggaaattaattctattaggaatggcccaaactgaattgtgacaggcagagggtgttcctgacagagggaagatgaatacacttgaccccaacatttctgcccatccctgatgaccaagacctcttcccagacccacagctgcaggggccaagtaataacagctcttaatagtttataatgcactgttttaatgctttacgactaaactcatctgatcctttcatcagccctagagggtagaaagttttcccaattctacacatggcaaaatggagacccagagtcacttgcccaaggtcgcacagctagtggtggagctggagtctgggcccaggctgtgagttccaggtctgtgctcatggccaccaggccctactgctcagggtgaatgcagctggtctctggccagtgcctggtgctctggcccctctcgtggagctactgcccatgatgctttcctagtgcctggttactctgcgagacttgagtctacctttggactgccttccttgggggtctgagatgaggccttatggcccagaggggaacttgattcaaaaatttgggattcatgtagcagagacagagctagactgtaaaggtcacaaactagctgtgtcaaggcccgtgatagccagaaagcggcagtttcagtccatatcaattgtgtgaccagggctagtcactttttacttctcagtgccatctataaaatggggataatagcactacctaccaagtgctgtgaggctcaaatgagccaaaggttataaacttgccttaaaactatagtcctatacaaaaattagctgggcgtggtggtgcatgcctgtaatcccagctactagggaggctgaggcaagagagttgcttgaacccaggaggcggagattgcagtgagctgagattgcaccactgcactccagcctggggacagagcaagactcttgtctcaaaaaaaacaaaaaaaacatatatactgctgtatcatgccaggatttatcagcattcccaagggagcttgcacggtactgaccgagtgctgagactactggtattcccagctgccatgtggcagcagcaggagctactagaatattctcagcacaggaatgaggcttccttggtttccatgtctgtaagggttactgatcacttaccttcttctctttcagacttgaatctgtagacatttctttattgatatggcaaattgcttgcagatatttttaaatgacagcaattttctaatatttggtttaataaaatgtgaataatgtcccttttaa

SEQ ID NO: 242 - DNA, 4018 bp, Homo sapiens
gtttgacgtggcagttcccagcccagctgcaactccgagcgtgagtccaggctaaggggacgccggccggggaagaggcgcggcgggagaagcgaccgcagcgggagcccggccaccgagggctgccggcactaggcgcagagccgccagcgctcggaagcccgcggggtgcgggagcgggaacagacttcttttgtagaattatcctatggaatgatattttcataatgagtcaacaaggttacgtggctacacctccgtattctcagcctcagcctggaataggcctttctccacctcattatgggcactatggggatccgtcgcacacagcatctccaacaggtatgatgaagccagcagggcctttgggggccaccgccactaggggaatgttgcctccgggtcccccacctcctggaccccatcagtttggtcagaatggagctcatgccactggtcaccctccccaaagatttccaggccctccacctgtcaacaatgtggcatcctcacatgcaccataccaaccctctgcacaatcttcttatccaggtcctatatccacttcatctgtcacccagctgggcagccagctcagtgctatgcaaatcaacagctatggttcaggcatggctcctccaagccagggaccccctggccctctgtcagccacatcattgcagactcctccacgacctccacagccttccattttgcagcctggatctcaagttcttccaccaccacccaccacactcaatggtcctggtgcctcacctttgcctctaccaatgtacagaccagatgggctctctgggcctcctcctccaaatgcccagtaccagcccccacctcttccaggccagaccttgggtgctggatatcctccgcagcaggccaactctggtccccagatggcaggcgcacaactgtcttacccaggaggcttccctggaggtcctgcacagatggctggtccgccacagccccagaagaagctggatcctgactctatccctagcccaatccaggtgattgagaatgatagagccagcagaggaggacaagtttatgccaccaacaccagaggccagatccctcccctggtcactacagattgcatgatacaagaccaaggaaatgccagtcctcgattcatccgttgtacaacatactgttttccatgcacgtcagatatggctaagcaagctcagattccattagctgctgtcatcaagccctttgccaccattccttcaaatgagagtcccctttacttggtaaatcacggcgagagtggaccagtcagatgcaacaggtgcaaggcctacatgtgcccatttatgcagttcatcgaaggaggaaggagatatcagtgtggattttgcaactgtgtgaatgatgttccaccattctatttccaacatctggaccacattggaagaagactggaccactatgagaaaccagagttatctctaggatcttatgaatatgttgccactttggattattgcagaaagagtaagcctcccaacccaccagcctttatcttcatgattgatgtttcatatagtaacataaagaatggacttgtcaagctcatatgtgaagaactgaagaccatgctggaaaaaattccaaaggaagagcaagaagagacgtctgcaattcgagtgggttttatcacatataacaaagttctccatttctttaatgtgaagagtaatctggcccagcctcagatgatggtggtgactgatgttggagaagtctttgttcctttgttggatggtttccttgtcaactatcaagaatcccaatctgtgattcataatttgttggaccagattccagacatgtttgcagactctaatgaaaatgagactgtctttgctcctgtcatccaggctggcatggaagcactaaaggcagcagactgtcctgggaagctgttcatcttccattcttccttgccaactgctgaagcaccagggaagctcaaaaacagagatgacaaaaaactggttaatacagacaaagagaagatacttttccagccccaaacaaatgtctatgactcattggccaaggactgcgtggctcacggctgctctgtgacactcttcctctttcctagtcagtatgtggacgtggcctcgctggggctggttcctcagctcactggaggaaccctttacaaatacaacaatttccagatgcacttggatagacaacaatttttgaacgacctcagaaatgatattgaaaagaaaataggctttgatgctattatgagggttcgtaccagcacaggtttcagagccactgatttctttggtggaatcttgatgaacaacaccaccgatgtagaaatggctgccatcgattgtgacaaggcagtgaccgtggagttcaagcacgatgacaaactcagtgaagacagtggagccttaatccagtgtgctgtgctttacacgacaatcagtggtcaaagaagacttcggattcacaatcttggcttaaactgcagctctcagctagctgatctttataagagctgtgagacagatgctcttatcaacttctttgccaagtcagcttttaaagcagttctccaccagcctttgaaggtcatccgggaaattctagttaatcagactgcccatatgttggcatgttaccggaagaattgtgcaagtccttctgcagcaagccagcttattctaccagattccatgaaagtattgccagtgtacatgaattgcttgttgaaaaactgtgtactactcagcagaccagagatctcaactgatgaacgagcataccagagacagctggtcatgaccatgggtgtggctgactctcagcttttcttctacccacaacttctgcccatacacacgttagatgtcaagagtacaatgttacctgctgccgttcgttgctctgagtcccgtctttcagaagaaggaatattcttactggctaatggtctacacatgttcctgtggttgggagtaagcagcccaccagaactgatccaaggaatatttaatgtgccatcttttgcacatatcaacacagatatgacattgctgcctgaagtgggaaacccatactctcaacaactcagaatgataatgggtattatccaacaaaagaggccatattcaatgaagctcacaattgtaaagcagcgagaacaaccagaaatggttttccgacagttcctggtagaagacaaaggactttacggaggctcttcttatgtggatttcctttgttgtgttcacaaggagatctgtcagctgcttaattaattgaaacttctctgtcattgatgttgcatttccaaggagataatctccttcttggtgcctaattttctagatgataataggctagttttgatttcttgctcattttcagaataactttccaggaagagatggcatttagaacttcagctttggtgctcaggtataaagccaattaaggtacaattgtaccataaagggaacaatctgtttctgattgcacagtttctaatttttaaaactgatgtggtttgcatttcataaaaggcaaagtttacagaaccataaacattctcaattttctttatgctagacatataaattatttttcaaactgtatagatttggggtaaaaagttgtctcagttcctctcccaattgcaatgagaaaaaaaagcttaatttttacattatacttaattttctaaaaccatgtaactccattgaacacatttttcaacttaaggtctgcatagcagacttttaataaccttgggatttatctggtagaacaatatgtgttctacatttttttcataattatatattgtgtatgttaaaactattttccagttgttttgtctgtaaaactgtctttatcaatatgcttaatggttctttgtacaattttgaaagtttctacctgtatataatggatgttaaccagtatcaataaatcacttcgtataatctta

SEQ ID NO: 243 - DNA, 3877 bp, Homo sapiens
gtcagtgtggaggagactgagtattctaccttgtaaatactgttatttgtatatactgtaaatgatgacatcggtgggcactaaccgagcccggggaaactgggaacaacctcaaaaccaaaaccagacacagcacaagcagcggccacaggccactgcagaacaaattagacttgcacagatgatttcggaccataatgatgctgactttgaggagaaggtgaaacaattgattgatattacaggcaagaaccaggatgaatgtgtgattgctttgcatgactgcaatggagatgtcaacagagctatcaatgttcttctggaaggaaacccagacacgcattcctgggagatggtcgggaagaagaagggagtctcaggccagaaggatggtggccagacggaatccaatgaggaaggcaaagaaaatcgagaccgggacagagactatagtcggcgacgtggtgggccaccaagacgggggagaggtgccagccgtggacgagagtttcgaggtcaggaaaatggattggatggcaccaagagtggagggccttctggaagaggaacagaaagaggcagaaggggccgtggccgaggcagaggtggctctggtaggcgaggaggaaggttttctgctcaaggaatgggaacctttaacccagctgattatgcagagccagccaatactgatgataactatggcaatagcagcggcaatacgtggaacaacactggccactttgaaccagatgatgggacgagtgcatggaggactgcaacagaggagtgggggactgaagattggaatgaagatctttctgagaccaagatcttcactgcctctaatgtgtcttcagtgcctctgcctgcggagaatgtgacaatcactgctggtcagagaattgaccttgctgttctgctggggaagacaccatctacaatggagaatgattcatctaatctggatccgtctcaggctccttctctggcccagcctctggtgttcagtaattcgaagcagactgccatatcacagcctgcttcagggaacacattttctcatcacagtatggtgagcatgttagggaaaggatttggtgatgtcggtgaagctaaaggcggcagtactacaggctcccagttcttggagcaattcaagactgcccaagccctggctcagttggcagctcagcattctcagtctggaagcaccaccacctcctcttgggacatgggctcgacgacacaatccccatcactggtgcagtatgatttgaagaacccaagtgattcagcagtgcacagcccctttacaaagcgccaggcttttaccccatcttcaaccatgatggaggtgttccttcaggagaagtcacctgcagtggctacctccacagctgcacctccacctccgtcttctcctctgccaagcaaatccacatcggctccacagatgtcgcctggatcttcagacaaccagtcctctagccctcagccggctcagcagaaactgaaacagcagaagaaaaaagcctccttgacttctaagattcctgctctggctgtggagatgcctggctcagcagatatctcagggctaaacctgcagtttggggcattgcagtttgggtcagagcctgtcctttctgattatgagtccacccccaccacgagcgcctcttcaagccaggctccaagtagcctgtataccagcacggccagtgaatcatcctctacaatttcatctaaccagagtcaggagtctggttatcagagcggcccaattcagtcgacaacctatacctcccaaaataatgctcagggccctctttatgaacagagatccacacagactcggcggtaccccagctccatctcttcatcaccccaaaaggacctgactcaggcaaagaatggcttcagttctgtgcaggccacgcagttacagaccacacaatctgttgaaggtgctacaggctctgcagtgaaatctgattcaccttccacttctagcatcccccctctcaatgaaacggtatctgcagcttccttactgacgacaaccaatcagcattcatcctccttgggtggcttgagccacagtgaggagattccaaatactaccaccacacaacacagcagcacgttatctacgcagcagaataccctttcatcatcaacatcttctgggcgcacttcgacatccactcttttgcacacaagtgtggagagtgaggcgaatctccattcttcctccagcactttttccaccacatccagcacagtctctgcacctcccccagtggtcagtgtctcctccagtctcaatagtggcagtagcctgggcctcagcctaggcagcaactccactgtcacagcctcgactcgaagctcagttgctacgacttcaggaaaagctcctcccaacctccctcctggggtcccgccgttgttgcctaatccgtatattatggctccagggctgttacatgcctacccgccacaagtatatggttatgatgacttgcagatgcttcagacaagatttccattggattactacagcatcccatttcccacacccactactccgctgactgggagggatggtagcctggccagcaacccttattctggtgacctcacaaagttcggccgtggggatgcctcctccccagccccggccacaaccttggcccaaccccaacagaaccagacgcagactcaccataccacgcagcagacattcctgaacccggcgctgcctcctggctacagttacaccagcctgccatactatacaggggtcccgggcctccccagcaccttccagtatgggcctgctgtgttccctgtggctcctacctcttccaagcagcatggtgtgaatgtcagtgtgaatgcatcggccacccctttccaacagccgagtggatatgggtctcatggatacaacactggtgtttcagtcacctccagtaacacgggcgtgccagatatctcgggttctgtgtactccaaaacccagcagtcctttgagaaacaaggttttcattccggtactcctgctgcttccttcaacttgccttcagccctaggaagtgggggccccatcaatccggccacagctgctgcctacccacctgccccctttatgcacattctgaccccccatcagcagccgcattctcagatccttcaccatcacctgcagcaggatggccagacgggcagcgggcaacgtagccagaccagctccatcccgcagaagccccagaccaacaagtctgcctacaacagctacagctggggggccaactgaggccctgaccctcttctcccggtcccatcttctgagagggcttctcagcctggaaactatggaaacagcatcaaagagaaaggaatgtggggggtttccgctgccccccacccccagcggcccaccccatgcctcagcttcatgtctgtcccattcctataccatccccaccctgttgtatgtattataggatttgtattttctccttttttttcccccttccattccttctcccctcttgcattcaagattatgaaactttgctatgggccctgcacttcctttgcttcctcctgttcaccctggtggtgtacggatgaggcggggaggtgggacccccaaacatatatcagcccaacagccctaagtctccttctttattattaggaaaacaacaacaacaacaaacaaaaaaatggcgtcatgaatatgaacagcattgtcagatgaattagttgaagtggttttttttttgttttttttttttttttgtactgtgtcctcaaatttaatggattaatgtgtcttgtatatataaaaagaaaacctcta

SEQ ID NO: 244 - DNA, 7781 bp, Homo sapiens
agaggctgcacagcccgcccggaccaacgcctccgcgcctgccgccgtctggccggcgccctcccgtttccttcctccagggggaaaaaatgtctttcgggccgctttccaggaagcagcaggatgcgccgctccactgtcggtagcaacaagctgcgcaaaccatgcaggatgatttactgatggacaaaagcaaaacccagccccagccccagcagcagcagcggcagcagcagcagccccaacctgagtccagcgtatccgaagccccgtccacgcccctctcctcagagacccccaagccggaggaaaacagcgcagtgccggccctcagcccagccgctgcccccccggcccccaacggcccggacaagatgcagatggaatcaccgctcctgccaggcttgagtttccatcagcctcctcagcagccgccgccgcctcaggagcccgcggcaccgggcgcgtcgctgtcgccgtccttcggcagcacctggtccacgggcaccaccaacgcggtagaggacagcttcttccaggggatcaccccagtcaacgggaccatgctcttccagaacttcccgcaccatgtcaacccagtcttcggaggcactttctccccgcagatcggcctggcgcagacccagcaccaccagcagccgccgccgcctgcgcccgcgccgcagccggcacagccagcgcagccaccacaggcgcagcccccgcagcagcgccgctcacccgccagccccagccaggcgccctacgcgcagaggagcgccgccgcggcgtacggccaccagcccatcatgaccagcaagccgtcctcgtcttcggcggttgcagccgctgctgccgcagccgccgcctcgtcggcctcgtccagctggaacacgcaccaaagcgtgaatgcagcctggagcgcaccgtccaacccctggggcggcctgcaggcgggccgggaccctcgccgggcggtcggtgtgggcgtgggtgtgggtgtcggggtgccttccccgctcaaccccatctcgccgctcaaaaagcccttctccagcaacgtgatcgcgccgcccaagttccctcgcgcggcccctctcacttccaagtcctggatggaggataacgctttccggaccgataatggtaacaatctgttgccatttcaggaccggagtaggccctatgatacttttaacttgcactcgttggagaactccttaatggatatgataaggactgatcatgaacctctgaaaggtaaacactaccctcccagtggcccaccaatgagtttcgctgatataatgtggaggaatcattttgcaggacgcatggggataaatttccatcatccaggaacagataatattatggcacttaacaatgccttcctggatgatagccatggtgatcaagccttgtcatctggcttaagttctcccactcgctgtcaaaatggggaacgagtagaacgctactctagaaaggtgtttgttggaggacttcctcctgatattgatgaagatgagatcactgccagctttcgcaggtttggacctctcgtagtagactggcctcacaaagctgaaagcaagtcttattttcctcctaaaggctatgcctttctgctgttccaagaggaaagctcagtacaagctttgatagatgcctgcctagaagaagatgggaaactctacctgtgtgtgtcaagccccaccatcaaggacaagccagtgcaaattcgaccatggaacctaagtgacagtgactttgtaatggatggttctcagcctttggaccccagaaaaactatctttgttgggggagttccacgaccccttcgagctgttgaactggcaatgatcatggaccgtttgtacggtggtgtctgctatgctggcattgatacggacccagagctgaagtaccccaaaggtgctggccgcgtggcattctccaatcagcagagttacattgcagccatcagcgctcgttttgtgcagcttcagcacaatgacattgacaaacgggttgaagtaaagccatatgtgctggatgatcagatgtgtgatgagtgccagggcacacgctgtggtgggaagtttgccccgttcttctgtgccaacgtcacctgtctgcagtattactgtgaatactgctgggcgagcatacattcccgagccgggcgggagttccacaaaccgctggtgaaggagggaggcgaccgccctcgtcacgtcccgttccgctggagctgagccacgggccgacccagccacaagtactggagtagataacaaggagggaaaagagagggcactgcctcagggcttacagtgttctggaaatctgtgcattcgttctcgatttttaaagaagaattgggtctttttattattattattattatttacagtcatattactgaactcagtgtccagtataatgcagaattgcagagtgtagaatggtactgatttgcactttgattcacacctttgtctgcttggtaccttaattttttatacctgatttgtcactcgtgacagtatgtagactgccattctcatcagcggccgtcaggctactgtctgtgattcttttgtttgttgttgtggtgttgttctgattgttttgaactggagcatgcacttattttcagaaacttagagagttgcccctaggacaagacttaccaaaggtaatactcgtgagtaggtggcagatgtagcaaaaacttcacaacaattcagcaatcattagctcgggtcacttagagtaaggataacccttcatgaaaataagcctttagttgctctctattttgacttgtaaggatacctcataagctggatcttttatttttccttcatgtttgatttttgttttgccgaggattttggttagatcttttagtattatgtaaatttatgctgcaatagcttttgctgctattaaaatggtattattaataccataatactctattcaggctaggatatcaattaaacacaaaaacccaacaacacacttttgtgattttagggatagagtcagctgccgaacggagatcagaatagacttcagaaagcttcggtggaaggtcactatttctgactgcatgtttacttaatcaggttgctgcatgcaataaattttatatccaatgtctagtataaaacgttcccacaatgcacaaattaagaatctatataagctataaaaatactcattttttaaaaaaagtttttttcattcaaagaattggtaattgaccggaggaaggcatgcctcaataaatggaatgctctgaatgggaagagcccataacagaatgacctatattacaaccgatataaaacctaggtgtaggatattcttcaagcaaatttgtggatggtagatgaagtactttgcggtgctctgttatatattgtgaaatttattttatatagtaaagtgattatgtctaactgtgatcaaacttaactgtttaaagcctctgtcagacattaatgaacttgacagttcataactgatatattataaactaacacatgagctcttagttacaatctcttagtgcttgcaccattttacatagcttcagaccttgtccagaaaaccaaagagctcatcttagcttacaaacactaagaatatatacaggatatagagataagttgtcagattgacaaactaggcacatttttaagaaagttgtgtaatggtgatgctaaagaaatgtctgtacaaaataagatggcctgggcagagttggttgtctgagtgagaaactaactacttaattccctggatttatcctgttaagcttgagtagaatgaaggcctgctagcactagcgtggtctagaatgaaggcctgctagcactagcgtggacatttttctagcattcacccttgggctgcagatagtaatatataaacacacacaatgattgcaagactatgtaaatctttttttaatcttcttcctatgttttggaattctggggacaatctgactggatatgacactgcagaatagatttaagtcgctgtgttttctgtgctgtgatgtccttgtactgtcttaagttagtgttgcttgtttttgttttgttctcccatgtttagttgcaattactggctctcaagctatagtttgttttcaaaaaggaaaaacaaaatagttttttactggattaaaaatgcttattttagaatcctcccctttttgaggctttttggtaataattgcttttttccagcccaggtgtggttttgtttgtttttttctatgtttgtgggttttttttcatctgtacaagaaattttgttatgcactactactttttgtattctagacagttttcaaaagttggcagatttttttttttgtttttaaggaaaaaggcatgctttctgactgacatgatcttttgcaatacctcaattttgaaatataggaaagaaaatgatattttctaagtaagtttattcagaaaaatatatattaatttaattctgcaagaaaatgatttaacagatgggtaactttatttttttcatgcttatttgtgttttttgaaaatgaagaagttagagctttataactataatattaaagatcatatctaacctacagaaatctacctaattatgtgaaagaagcaaaactttttgaagaagcacccctctttcatgtattaaaataacactgagatttttttaaaagctggaagattgtacagcataaagctaaagtgaaggcaaaaaacattgtcctgaagaataggttacaaaaaataaactccatttggtgctgaaagttgtgaatagatggtggaaactactttcccttaatttgtatatttctaatcaagtgttgattgtgcgcgactgaccaggattgtgaaagagttcttctgtttgtatttttttaaagagaacttttttagtttattaaattataacatgttcccttttgttttgtaaataaatgtgcccccaagttgttaatgttatattaaaagagagggtccttcaaaaaaattattttttaaaacacagaggtgttctgacctgcaacttgactgggaagcccctgggtaacacaggtcctgctgtggcctttccttggtgtgacacttgaactagtcgattttttgaaggctataacctaacctcgactatttgttgttatgtgcaatactgtttgtactgtttgtataaaaaatagaaaaaaaaaagaaaagaaaaaaggcataaatctttattgcagatttattttcattgcaaactttagacattgtgattcactgaaatcatttttctactgtcaaatatgtaccttttcttcatgctggtattttttcaatagtaatgtagcctttgtactgagacaaattttcattgttatttttagaaagattttttgctaagaaaaaaattaaacatatttacatatttttcattttatttcgtattttctttaaggagtgctttctcaatcattaatagagttgtttctgggagggactttcatatctggtcaatgtcataatattattttgtatttttattggaataaattaattttatgatgctaattctttaaaagtttatttttttcattttcagttatttttgaagctaaaacctttgtaatattgttactaaagtgtctagttttttgaaatgcaaagctttatgtattaacttgctgatgtggtttacaatagtgtgacaacgatgaaaatgcttggttatgtaaagtgattggaaatgtaatggataattgggtaataaaatgacagaatgagcagaacatgtgagattttgagaagccttttcctttatcacagtggtttagtgtaagactagggatgtcacagtgcagttctctagggatgtcacggtggatttatacaacaccaggtgcagccaaacctgtggccctgagaatgaagtcacccaaccgaagtaccactgggtttaaaatctggctaagtcaacagaatgtttcattgctttttcccctctaactcgtcattatgtcgtgtgtgtgtgtgtgtgtgtgagagagagagagagagagagagagaaaaactgccaccaactgctgtccttgtgtgagacagtgcctttctcccaggccgaatcttttatgtgcactgacagtggtgatatcggagtcatacaggaagttgctaagaggacacggctttcgtggtgtactgcagacctcacctgcagggtctcactcatgctgcctccctgtaaggctcagttggtggcactgaggaagcacactcggatgtcaccactgtctgtggaccctgactatgtgtcgggttgcatcttcctccacacccatgcctgcttcctgttctggtgccccttgcctttcattgtggcaactgcgtgcatgatctgtctgcctttctgctgctgcttttccaacaccctcctcacctggaagctgggcagttaaggcacagtcattaatgtgtcattgcaatagcacctacagtcaaagcaaaaactacaactgcaaaactggtgttgcgtaaacagaacagccaatgacttgatccagatagatgatatgtttctactagtggttgatggcctctttcagctccatcgctatggaggcgaggttcatcaataactcagagaaacttgtgtccagagttggtcttgggtatgctctatgtattcagttttgtaaataatatatagattagatcaagttgtgatgtaaaattttaactcaaattgggtactactggttggaattttacattaactacaaataaatgattaggaacagaagaaaagtggaaaattcttgcttagtggtataaagattatgcttagatttctgcctatatcttgtgttttatagcttgttagtgaggcatgggctaatgcagaatgtactgcatttatgcaattagcaaataactgctagttttcattttatctattatattagcaacaaaaatggcatttaactgggtaaagctcctacctaaatatttgagtattgtgacatctctacttgcaaggtttgagtgaaagattagtcacagattagtgaaaaaaatgtatctttttgttaaaactggcttatttgaatggattgttgcttttcactagcttgtatggtatgtcagctaacatttgtttttttttttcttttataataaccaaacttctctatctcagctgcaatagtgttccatcttaccacagagtgttttataattaatgctgttgactttataccccaaaatgggtcaagaagtggctacatgattaggggatgtttaaatttgtatgacgacaaagttaattgcaacaagtagaaaacttgggtgctaacacaggataacttctgctctttttctttcctggatatagttctgttggggtataaagtattaggtatttgtattttttgctgtcaaaataatggacttaacttttagagtgttcacagctaggatctctgtatttgtttttcaactaacaactaattttaaatgtattgtatcttttattacctgttctcttagattgttttttgctagtaacccttactcagcttctgcctttggggcttggactaatattgcttgtatggaactacagtactgtgactaaacatggagctcaatgcagctactgcttacaactgcttaaactttgtagtttggacttcatttttttctgtaataacaacttattaaatctagttgtatgaagta

SEQ ID NO: 245 - DNA, 6052 bp, Homo sapiens
gggaaccaaaaaaggctggaagaacatgaagatggagcagtcataaaccacccactcaaggaccatctccttcaggaccatccacacgagactcagattgtctgaattgagctatcgcaacttaatgctaaaagctccttaaagctacagatttatgacatagttccttccaaaatattacatcataaatcattgagaagattaaaaaaaaacacttgaagaaattgtagttttaaacatctctgcatatattttggatagctactaggttactttaactgtcattaaggagcacagacttactgaagctttactggacagaatcctgggaaatcgatatcattataaggttatatttcccagttagcgggtgaagggctggagaccttattgcagtcatggctttcacaaattacagcagtctgaatcgagctcagctaacctttgaatatctgcacacaaattcgtaagtatcctctaggtgccactgaggtaaccagtaactcgttccttgatattatatggaaatcgtttccccagaaaattttgctttttcactttttgagatgtatcccactggagtgaaatgtgtcactggatatcttgagctctgtattgaagaactgagatcagtgaaatacttgttgctaatccagaagaatctgatttttgtttattggatcaaaattttctaaatgcaaactttagttatttgaagtcaatatgttgagttgtttcattcaagtgtttataggaatccaacaaatactgctctattggatcgccaaatgttggactattttagtatcaaccgtttcccctctgtagtgacaacgtcctaaacagttaggtttataacaagtgtttactttctaacaagaaaacagaagacatttaaatgacaactttcaagaagaaaatttttattttttcagaagttggcattatcttcctggcagattgctcacatccaatattatttgtatatgctaaacaggaaacggcaacttgtttatatctctatttagatagtctttccccaaaatttccacagaaacatacagtgttcatggttcttgagttcatgaaggagtaatctaatcactccaacatggtctggaatgtttcaggtttaatccatatgcccactctcttggaggctgtccagtagcgtcaaaactttagtgttttaatacattcacctgttacttttgagatgaagttcacctttcttggatcacatgcaaaggatgtttaggtctgtgaagaaaagaatttctaggccgggtgctgtggctcacgcctgtaatcccagcactttgggaggccgagaaccactcacgaattcttgtttggtgcccttgctgaactggttgataatgcaagagatgctgatgccaccagaatagatatttatgcagaaagacgagaggaccttcgaggaggatttatgctttgctttttggatgatggagcaggaatggatccaagtgatgctgccagtgtgatccagtttgggaagtcggccaagcgaacacctgagtctactcagattgggcagtacgggaatgggttaaaatcgggctcaatgcgcattgggaaggattttatcctgttcaccaagaaggaagacaccatgacctgcctcttcctgtctcgcacgtttcatgaggaagaaggcattgatgaagtgatagtcccactgcccacctggaatgctcggacccgggaacctgtcacagacaatgtagagaaatttgccattgagacagaactcatctataagtactctccattccgcactgaggaggaagtgatgacccagtttatgaagattcctggggacagcggaacattggtgatcatcttcaatctcaaactcatggataatggagagccagaactagacataatctcaaatccaagagatatccagatggcagagacgtccccagagggcacgaagccagagcggcgctcgttccgtgcctatgccgctgtgctctatattgatccccggatgaggatcttcatccatgggcacaaggtgcagaccaagaggctctcctgctgcctgtacaagcccaggatgtacaagtacacgtcaagccgtttcaagacccgtgcggagcaggaggtgaagaaagcagagcacgtagcaaggattgctgaagagaaggcgcgggaggcagagagcaaagctcggacattagaagtacgcctaggtggagacctcacgcgggactccagggtgatgttgcgacaggtccagaacagagccatcactctgcgcagagaagccgatgtcaagaagaggatcaaggaggccaagcagcgagcacttaaagaacctaaggaactgaattttgtttttggtgtcaacattgaacaccgggatctggatggcatgttcatctacaactgtagccgactgatcaaaatgtatgagaaagtgggcccacagctggaagggggcatggcatgtggcggggttgttggggttgttgatgtgccctacctggtcctggagcctacacacaacaaacaggactttgctgatgccaaggagtaccggcacctgctccgagcaatgggggagcacctggcgcagtattggaaggatattgccatcgcccagaggggaatcatcaagttctgggatgagtttggctacctctctgccaactggaaccagcccccatccagtgagctgcgttacaaacgccggagagctatggaaatccccaccaccatccagtgcgatttgtgtctgaaatggagaaccctccccttccagctgagttctgtggaaaaagattaccctgacacctgggtttgctccatgaaccctgatcctgaacaggaccggtgtgaggcttctgaacaaaagcagaaggttcccctgggaacattcagaaaggacatgaagacgcaggaagagaagcagaaacaactgacagagaaaattcgccagcagcaggagaagctggaggcccttcagaaaaccacacccatccgctcccaagcagacctgaagaaattgcccttggaagtgaccaccagaccttccactgaggaacctgtgcgtagacctcagcgtcctcggtcgccccctttacctgctgtgatcaggaacgcccccagcagacccccttctttgccaactcctagaccagccagccagccccgaaaggctcctgtcatcagcagtaccccaaagctccctgctttggcagcccgggaggaggccagcacatctaggctgctccagccacctgaggcaccccgaaagcctgccaacactctcgtcaagactgcatcccgacctgcccctctggtgcagcaactgtcaccatctttactgcccaactccaagagccctcgggaggttccttctcccaaagtcatcaagactccagtggtgaagaagacagagtcacccatcaaactctccccggctacccctagtcggaagcggagtgtcgcagtttctgatgaggaagaagttgaggaggaagctgagaggaggaaggagaggtgcaagcggggcagatttgttgtgaaggaggaaaagaaggactcgaatgagctctcagacagtgctggggaagaggactcggctgacctcaagagagctcagaaagataaagggctgcacgtggaggtgcgtgtgaacagggagtggtacacgggccgtgtcacagccgtggaggtgggcaagcatgtggtgcggtggaaggtgaagtttgactacgtgcccacagacacgacaccaagagaccgctgggtggagaaaggcagtgaggatgtgcggctgatgaaacccccttctccggaacatcagagccttgatacacaacaggagggcggggaggaggaggtgggccctgtggcccagcaggccatagctgtcgcagagccctccacttccgaatgcctccgcattgagcctgacaccactgccctgagcaccaatcacgagaccatcgacctgcttgtccagatcctccggaattgtttacggtacttcctgcctccaagtttccccatctccaagaagcagctgagtgctatgaattcagatgagctaatatcttttcctctgaaggagtacttcaagcaatatgaagtagggctccaaaacctgtgcaattcctaccagagccgtgctgactcccgggccaaggcctccgaggaaagcctgcgcacctccgagaggaagctccgcgagacggaggagaagctgcagaagctgaggaccaacatcgtggcactcctgcaaaaggtgcaggaggacatagacatcaacacagatgatgagctggacgcctacattgaggacctcatcaccaagggggactgaaggcaggagagagagcagctcccctgcccacctgcccctcaaccctgtagctgcagggggaggggacttcattcatgggttggtggtcgcaccttggtttgacttacacgggacatttgtgtttttggaggaaaagataccctgattctttgaatcttccttaagtttataaatatttattttttaaaagaagatgctgtgcctgtgagaccatacttttttttttttttttttttttttttttttttttttggtgactgcaaaggacagagaacctttccactttggccatactgggttgctaagccggagccatttcagctcctggctcctcaagataacggcgagtccagtgccatcttggagaagctccaggggcagggctgacttttctcctacaggaggaacaatgtggggatctgagggatgggagggagacttccccctagagtggtggtcctgctgggggctcatatccagggacccaaaaggggggctgtgtaggaggttccacattggaggggctctctctctcgcagctgtcagagttggtcctggctgtggcgtccaaacagcttgagggaaaaagatcctgtctaaccacctcatctactactcaagttctttctgaaggagggatttcttcagttaaccatggacagtgaggtttctcaccacagtaacttgagtccaggttgagggggagacagatctgtggtaaatctctgacttgggcagcacactgagtgtggaaccccacaggactccttagggaaggagcttgtgtgtgaaagaacccctggggctgagctggtgacctccatgtgtgggtgcagcagggccttggatggtgccaattgatctggacagcctgttgatgcttttctacttccacccttcggcctggccccactgagccccatcaaggtgcctgaagagggggccagtgagatcccgtggccacagggactccagaggcatctctgcaggaagcacaccatgccttccctccatgttccatcacggcgccacaatctgtgtcccttaacttctcagggtcaaagacaaaggcaagcgttgctgaattttctctttaatggccattggaagagtctggttcagtttttcccaactctcttcccactcgtatttggggcctctgggttttctgaaggcacaaggactgtgactttgtaccactaacctgtggttcaaacctgggtgtgtttctggcatctccctaacccagatcagcaatggccaccctgctcctctgaggtcagcagaagactgggaagcagaggtgagggatgcaggccacactggaatgggaagtcttttccccactggatgtgcctgtctggtgggttttggaccttcccagactacatctctaggagaggcctgtttggagtagtacactgagagaccctggcctcttctgctggaagactgtccaagtcttggggtttcttgagctggtgattcctctgccatcctgctctctctcttcatctcaggcagcatggggtccacttttgtccccaaacctaatgttttaatccaaatgcaaattggttccacatttttactggagggtaatcagtttttaaaattcacacacatgtaatcgaaacgcaatactataaagttctactggtgagactcctgaaaaaaaaaaaaaaaaaa

SEQ ID NO: 246 - DNA, 4034 bp, Homo sapiens
gcagtactggacccgagcgcgacggtgcggctggcggacccgggctggcttgtggggaaacgaaactgagggaggaggcggcggctctggcagcggcggcgacagtgtcggcctgaccccccctccgctccccggcagctcgctctctcccctcagcttaacgatgaagaggagaactgacccagaatgcactgcccccatcaagaaacagaaaaaaagagttgcagagcttgccctgagcctcagctccacgtccgatgatgaacctccctcctctgtcagtcatggagcaaaagcatctactacaagccttagtgggtctgatagtgagaccgaggggaaacaacacagctctgactcttttgacgatgcattcaaagcagactctcttgtggaaggaacttcttctcgctattccatgtataatagcgtctcccagaagcttatggccaagatgggcttcagggaaggtgaaggattgggtaaatacagccagggtcggaaggacatcgttgaggcttccagtcagaaaggtcgaagaggcttgggtctgacactccggggctttgaccaggagctgaacgtggactggcgagatgagccagagcccagtgcttgtgagcaggtgtcatggtttccagaatgtaccactgaaattcctgacactcaggaaatgagcgattggatggtggtgggaaagagaaagatgattattgaagatgaaacagagttttgtggggaagagctgcttcacagtgtgttgcagtgtaagagcgtgtttgatgtcttggatggggaagagatgcggcgagctcggactcgggccaatccctatgagatgatccgaggagtcttctttctaaacagggcagcaatgaagatggctaacatggattttgtatttgatcgcatgttcacaaatccgcgggactcttatgggaagccactggtgaaggaccgggaagctgagcttctgtactttgctgatgtctgcgcaggcccaggtggcttctcagagtatgtgctgtggaggaagaagtggcatgcaaagggctttggaatgactttgaagggccctaatgacttcaagctggaggacttctactctgcttccagtgaactcttcgaaccctactatggtgagggtgggattgatggagatggagatatcacccgcccagagaacatctctgcttttcggaattttgtcctggataacacagatcgcaagggtgtccattttctgatggctgatgggggtttctcggtggaggggcaggagaacctgcaggagatcctcagcaagcagctgcttctgtgtcagttcctcatggcgctgtccattgtccggacaggaggccacttcatctgtaaaacctttgacctgttcacaccgtttagtgtggggcttgtctacctgctgtactgctgctttgaacgagtttgtctcttcaagcctattaccagccgtcctgccaactcagagaggtatgtggtgtgcaagggcctgaaggtgggcatagatgatgttcgggattacctcttcgcagtgaatattaaactcaatcagctgcggaacacggattccgacgtcaacttggtggtccccctggaggtgatcaagggagaccatgaatttactgactacatgatacggtccaatgagagccactgtagtctgcagatcaaagctctggcgaaaatccatgcctttgttcaagacacgacactgagtgagcctcgacaggcagagatacggaaggagtgcctccgactctgggggatcccagaccaggctcgtgtggctccttcttcctccgaccctaaatcgaagttctttgagctaatccagggcactgagattgacatcttcagctacaagcccacactgctcacctctaaaaccctggagaagatccgccctgtgtttgactaccgctgcatggtatctggcagtgagcagaagttcctcatcggcctggggaaatcccagatctacacatgggatggccgccagtcagaccgctggatcaagctagacctgaagacagagctgccccgggacactctgctatctgtggaaattgtgcatgagctgaaaggggaggggaaggcccagaggaagatcagtgccatccacatcctcgatgtccttgtgctgaatggcaccgacgttcgggagcagcactttaaccagcgaattcagcttgccgagaaatttgtgaaagccgtttccaagcctagtcggcccgacatgaatcccatcagggtgaaggaggtgtacagactggaagagatggagaagatttttgtcaggttggagatgaagatcatcaagggctccagtggcaccccaaagctcagctacacagggcgtgatgaccggcactttgtacccatgggcctctacatcgtcaggacagtgaatgagccctggactatgggattcagcaaaagcttcaagaagaagttcttctacaacaagaaaaccaaggactctacttttgacctccctgcagactccattgccccatttcacatttgctactatggccggctcttctgggagtggggggatggcattcgtgtgcatgactcccagaagccccaggaccaggacaagctgtccaaggaggacgtcctctccttcatccagatgcacagggcctaagagcctcagaatgtgccacccctgcagaatgccctgtcattcctgagatggggccacctggggcccacagtgctggcttcttccccctcttgaaaagggactggggagcattgcacctggcatgaggagtgggtggcctcctctccatcccctgaagagctcaggcagggccctgcagagaacactcatgttccttctgggacacctgcctgggaactttcccctgccaggactcagcctgaaggaagctgctcctgaggcaggtatgaggtcagtgcctagggcacgtgggactgatggaggacatatcagagtggcagagctgtgggctctgctgttctctcctgcatcctgtagactcacttttctgagttccatgcactgccctgagggtagccatgcccttgctttgcccaactttttattgggccatccctgagtgggtggagacctgctgtcatgagctggccaggagaacctgctataaaaaaatcaaggttttgtttctttgaacttactctgttttgatgccaaattggagaccattttcttgtctccttcccccactcatcctggccttccctggagttcttcctagcccagagctctgacagtccagcagggtgggaaggagggagtttgggcaaactctcatccctgataccacattgagatcctgggagccctcttttcgtactgagtatggagttgtagagccatcctaggtgccatccccttttggtccaaacattgggcagcgctagatggcaggaagcagccttgaagacccgtctttcccccacagcagcaggggccccagcagtaacaaagggtacctccaggggtttgggtagcgctgccctctggcagtcatgcaccgctgtctgccatagccgctctagggtcttggcagaattctgagcttgaagtgcagctcccttactaccctttcccttcctttttcttccctaataggaggtacaatctgcttttgtttgtcgttaagtggtcactcccatttcctttatcttggccgacaacacagagaggagggggagctgggcagtagcttggggtgggggtgggcacctgtggttgtttttaatgggaaatacctctcagagatgttcatgcaggctccctagggccccatcccagtgccaggctggtttccatggagatagggcactgaggctcccgtgaggttggaatcgacttcaccatgggggtccttcagccagcatccagctccccacccccaggctggcagtagcactgctgagatgctgtatttccacccaattctgggtatatcagtgtgtcttgcagaatcttggatcattaaagataaacatatttttaa

SEQ ID NO: 247 - DNA, 9674 bp, Homo sapiens
gactcggctcaaacatggctgcgctgagagctctattgctttgggcgccgggagcaggaggtactccgcgaatgagaacattgagaatgtgttcggcataactcatttctttgtatctccctgcactctgtgctgggaaaatgaatcatccatttggaaaagaggaagctgcttcgcagaagcagctttttggatttttctgcgaatgcctgcggaggggagaatgggagctggcacaggcatgtgtacctcagctacaggagggacaaggggatatcccaaagagggtagaagacatacttcaggcattggtggtgtgtccaaatctgctgagatgtgggcaggacatcaaccctcaaagagtagcctgggtctggcttcttgtactggagaaatggttggcccgggaaaagaagttactcccagttgttttccggagaaagcttgagtttcttttattgtcagaagacctccaaggtgacattccagagaacatcctcgaggagctgtatgagaccttaacacagggtgcagtaggccacgtgcctgacggaaatccaaggagggagagctggactcctcgtctcagctccgaagctgtctctgtgctctgggatctcctgaggcagtctccccagccagcacaggccctgctggagctcctgcttgaggaggatgacggtactggcctctgtcactggcctctgcagaatgcactggtggacctcattcgaaaggcattgcgggctttgcagggccctgattcggtgccccctggggtagtcgatgccatctatggagccctgcggactctgcgttgccccgcagaaccacttggggttgagttgcatctcctgtgtgaggaactactagaggcctgcaggaccgaggggagtcccctgcgggaggagcggctgctcagctgcctgctgcacaaggccagccggggcctgctgtccctgtatggccatacctatgcagagaaggtcacagaaaagccaccgagggctacagcctcgggaaaagtctcaccggatcatctagatcctgagcgggcaatgctagccctgttctccaatcccaacccagccgaggcttggaaagtggcctatttctactgcctgagcaacaacaaacacttcctcgagcagattctggtaacagcactaacattgttgaaagaagaagacttcccaaatcttggctgcctacttgatagagaattcaggcccctcagttgcctgcttgtactcctgggctggacacactgccagagcctagagtcagccaagaggctgctccagaccctgcacaggacccagggcccaggctgtgatgagctcctcagggatgcctgtgatgggttgtgggctcacctggaggtcctggagtggtgcatacagcagagcagcaaccccataccaaagagagatctgttgtatcatttacacggtggagacagccactcagtgctctacactctccatcaccttacaaaccttccagccctcagggaggaagatgttctcaagctcttacagaaagtgccagccaaggacccccagcaagagcctgatgcagttgatgctccagtccctgagcacctgagccagtgtcagaacctgacactctaccagggcttctgtgccatgaagtatgccatctatgccctctgtgtaaactcacaccagcactcccagtgccaggactgcaaagacagcctctctgaggacctggcctcagctacagagccagcgaatgactctctctcctccccaggtgctgcaaatctcttctcaacttacctggccaggtgtcaacagtatctgtgcagtattcctgactctctgtgcctggagcttctggaaaacatcttctcattgcttctcatcacctctgctgatcttcacccagagcctcacttgcctgaggactatgctgaggatgatgacattgaggggaagagcccctcaggtttgaggtccccatcagagagccctcagcacatagcacatcctgaaaggaagtcagaacggggttccctgggagtcccaaagacccttgcttatacaatgccaagccatgtgaaggcagagccaaaagacagttacccagggcctcataggcacagctttttggacttaaaacactttactagtggtatcagtggatttctggctgatgaatttgcaataggggccttcctcaggcttctccaagagcaactggatgagatcagtagccgcagccctcctgagaagccaaagcaagaaagtcagagctgctcaggaagcagagatggactgcagagccgcctgcatcgactttccaaggttgtctctgaggcccagtggagacacaaggtggtgacaagcaaccatcgttcagaggagcaaccttcccgaagataccagcctgccacacgtcaccccagtctccgccggggtcgtcggacaagaaggagccaggcagatggccgagacagaggttcaaacccatccctggaaagtacaagtagtgagctgagcacaagtacgtcagagggaagtctgagtgccatgtctggccggaatgagctgcacagtagattgcacccccatcctcaaagttcactcatccccatgatgttctccccacctgagtcactgctggcatcctgcatccttcgcgggaacttcgcagaagcccatcaggtgctgttcacgttcaacctgaagtcctcacccagttcaggggaactgatgttcatggagcgctaccaggaagtgatccaagaactggcccaagtagagcacaagattgaaaaccagaactcagatgcgggtagcagcaccattcggagaactggcagtggccgctcaactctacaggccattggcagcgctgcagcagcaggaatggtgttttactctatctctgacgtgactgacaagctgctcaacacctctggagaccccatccccatgctccaggaggacttttggataagcacggctctagtggagcccactgctcccctgagagaggttctggaagacctcagtccccctgccatggctgcatttgacctagcttgctctcagtgccagctctggaaaacctgcaagcagcttttggagacagccgaacggcgtttgaatagtagccttgaaaggcggggtcgacggatagaccacgtactcctaaatgctgatggcattcgaggttttccagttgttcttcagcaaatcagtaagagtctcaattatctgcttatgtcagccagtcaaaccaaatcagagagtgtggaagaaaagggaggaggccctccacggtgcagcatcactgaactgcttcagatgtgctggcccagcctaagcgaggactgtgttgccagccacaccaccctctcccagcagctagatcaggtccttcagtcactgagagaggcactagagctgccagagcccaggactcctccactgtcttccctggtggagcaggcagcccagaaagctccagaggcagaggcccaccctgtgcagatccagactcagctcctccagaagaacctgggcaaacagaccccatcaggcagcaggcagatggactacttgggcaccttcttcagttactgcagcacccttgctgcagttctccttcaaagtttgagctctgagcctgatcatgtggaggtcaaggtaggaaatccctttgttctgctgcaacagagctcttcccaactggtgtcacatctcctgtttgagagacaagttcccccagagagactggcagcccttctggcccaagagaatctcagcctaagtgtgccacaggtcatcgtcagctgctgctgtgagccccttgctctttgctcatcccggcaaagccagcagacctcctccctcctgactcgtctgggtactctggcccagctacacgcctctcactgcctggatgacctcccactttctacaccgagctccccgaggacaactgagaaccctacattggaaagaaagccctactcctccccaagggactcatcactcccagccctcacctcctctgccttggcctttcttaagtcacgctcaaagctcctagctacggtggcctgcctgggggcttccccgaggttaaaggtcagcaaacccagcttgtcatggaaggaacttcgtggccgcagggaggtgcctctggctgcagagcaggtagcccgggagtgtgagcgccttctggaacaattccctctgtttgaggccttcctcctggctgcctgggagcccctgcgagggtctttgcagcaggggcagagtctggcagtgaatctctgtggttgggccagtctttctaccgttctcctgggcctacattctcccattgccctagatgtactgagtgaggcttttgaggaatccttggtggccagagattggtcccgggcccttcagctcactgaagtgtacgggcgagatgtggacgatttgagcagcataaaggatgcagtcctgagctgtgctgtggcatgtgacaaagaaggttggcaatacctgtttcccgtgaaggatgcatctctgagaagtcggctggccctacagtttgtggacaggtggcccctggagtcatgcctggagattctggcctactgcatttcagacacggctgtccaagaaggactaaagtgtgagctacagaggaagctggcggagctgcaggtgtatcagaagattctgggtttgcagtctcccccagtgtggtgtgactggcagaccttgaggagctgttgtgttgaggacccatcaactgtcatgaacatgattctagaagcacaggagtatgaactgtgtgaagagtggggctgcctgtaccccattccaagagaacatttaatcagccttcatcaaaagcatcttctccaccttctagaaagaagagatcatgacaaggctctgcaactcctgcgaagaatccctgaccccaccatgtgccttgaagtgacagagcaatccctcgaccagcacactagcttggccacttctcacttcttggccaactacctcaccacccacttctatggacaactgactgctgtccgacaccgtgaaatccaggcgctgtatgtgggatccaagattctgctgaccctgcctgagcagcaccgggccagctattcccacttgtcctctaaccccctgttcatgctggagcagctgcttatgaacatgaaggtggattgggccactgtggctgtgcagactctccagcagctgctggttggacaggagattggcttcactatggacgaggtggactcactgctttccagatacgcagagaaagccctggactttccataccctcagagggagaaacgatcagattctgtgattcacctccaagaaattgtccaccaggctgcagatcccgagaccctccctagatcaccatcagcagagttctctcctgctgctcctcctggtatctccagtatacattcccctagtctaagggaaaggagtttcccaccaacccagccctcacaggaatttgtgcccccagcgacaccccctgccaggcaccagtgggtaccggatgagactgagagtatctgcatggtctgctgcagggagcacttcaccatgtttaacaggcgtcatcattgtcgccgctgtggccggctagtgtgcagctcctgctccactaagaaaatggtggttgaaggctgcagagagaaccctgctcgtgtgtgtgatcagtgctatagttactgcaacaaagatgtaccagaggagccttcagaaaaaccagaagctctagacagctccaagaatgaaagccctccatactcgtttgtggtgagagtccccaaagcagatgaggtggaatggattttggatctcaaagaggaggaaaatgagctggtgcggagtgaattttactatgagcaggcccccagcgcctccttgtgcattgccatcctgaatctgcaccgggacagcattgcctgtggtcaccagctgattgagcactgctgcaggctctccaagggcctcaccaacccagaggtggatgccgggctgctcacggacatcatgaagcagctgctgttcagcgccaagatgatgttcgtcaaagccggccagagccaagacttggctctttgtgacagctacatcagcaaggtagatgtgctgaatattttagttgctgctgcctatcgccacgtgccatctttggatcagatcttgcagccagctgcagtaaccaggctaaggaaccagcttttggaagccgagtactaccaactgggcgttgaggtctccacaaagactgggcttgataccaccggggcgtggcatgcttggggcatggcctgcctcaaagccgggaacctcactgctgcacgggagaagttcagtcgctgtctgaagcccccatttgacctcaatcagctgaatcatggctcaaggctggtgcaggatgtggttgagtacctagagtccacagtgaggccctttgtatccttgcaagatgacgattactttgccaccctgagggaactggaagctacccttcggacgcagagcctttctctggcagtgattcctgaagggaaaatcatgaacaacacctactaccaggaatgcctcttctacctgcacaactatagcaccaacctggccatcatcagcttctacgtgaggcacagctgcctgcgggaagctcttctgcaccttctcaacaaggagagtcctccagaagtttttatagaaggcattttccaaccaagctataaaagtgggaagctacacactttggagaacttgctagaatccattgatccaaccttggagagctggggaaagtacttgattgctgcctgccaacatttacagaagaagaactactaccacattctgtatgagctgcagcagtttatgaaggaccaagttcgggccgccatgacctgtattcggttcttcagtcacaaagcaaagtcatatacagaactgggagagaagctctcatggctacttaaggccaaggaccacctgaagatctacctccaagaaacatcccgcagctctggaaggaagaaaaccacattcttcagaaagaagatgactgcagctgatgtgtcaaggcacatgaacacacttcagctgcagatggaagtgaccaggttcttgcatcggtgcgaaagtgctgggacctctcaaatcaccactttgcctctgccaaccctgtttggaaataaccacatgaaaatggatgttgcctgcaaggtcatgctgggagggaaaaatgtagaagatggttttggaattgctttccgtgttctgcaggacttccagctggatgctgccatgacctactgcagagctgcccgccagttggtggagaaagagaagtacagtgagatccagcaactgctcaaatgtgtcagtgagtcaggcatggcagccaaaagtgacggggacaccatcctcctcaactgcctggaagcgttcaagagaattccgccccaggagctggagggcctgatccaggcaatacacaatgatgacaacaaggttcgggcctacctgatatgttgcaaactgcgttctgcctacttgattgctgtgaagcaagaacactcacgggccacagcccttgtccagcaggtgcagcaggccgccaagagcagcggggatgcagtagtgcaagacatctgtgcccagtggcttctgacaagccacccccggggtgcccatggcccaggctccaggaagtgaccttgggcagtggggccaggaacacgtggcctgagagctgggcaacagcagtgatggcgatgccctccacctctttcctccagtggagtgggacttctctggctctgccctaggttggaaagagttggattggaccctacttgccttcccgggcaaggataggacctttcacgcaagtgccatgtttctctaaaattgtggaatctatgtgtgtttgtctggagatggccagttctttctacctcagagtgagtgagtgagtatgtgtgcacacacgtgtgcatgttcctgtgcgctgatgtttacgcccaagcatttctgaacaaatgaaactcttctccatttaaaagaggcactttactttagacttgccactctgaaaaccttccctgcgttttggttcttgacccgggttgtcctgtttgtatagtcccccctctgtggacgtgctttagtagctcctcttacctagagggcttttacagagaattagagcaacaccaaaaggattgcctcttttccttccttcccattccaaaattcagagatggctttggggcaagtgctacctgtggaataaacctgttttccaggtgtctcttctcccaagcacaagaagtcctggagtctttggaaggtagtctgaatagaagggttttcaggtgcaggcatctgaaagctgtgggtatgtgtataaatgatcaggtctgtgaggctaacacgggcaagagggaaagaaaggctaaccatccaaacagggatacaggggaggcggtggggggtggtggggggagcgggtgctcacaagcacagagctgcctgttgtgaatgtccctgctgcaaagttggtgggtgagagaatgggacttcctctttgagagtctggggagagaaaaggtggccaggatcctaggactgaatgactcgattttacctatttgagctgcagtcctgtttgcgctccttgaattggttaggaagctgcttccttttccctcctgcttcccttcagtctcttcaggaccacaggatggatatgcagacatgtggggtcattgggaagggagtgcgcttcttttctctgtcttagaaaagggagtcaagggttggctttggaattgggcctctggacagagtcagaatgagggaataatgaataggtcacatctggttggtggaaaactaggtgaagtgcttctttaatatgcactgtcttgtcttcccacgcaagatgtgacaatgtttgagaaaaggtgtgtcatactcagtgacttcaatttgcaaatgtggggcctaaagaaagctctgcagctctgaacctctcactggccagagctcagcctattggtcccatccatgatgctgagacaaacagaaactggaagctgaagtcagtgtctctggtgctcagaaaccctgtggatttccctctgaaccaagatttttagtagtaaaataaacaactcatggacatctgtcagatgagaagttttggtcctgttagagaggagaaagactgtaatgaaactactagacccatttgggctaaagtttggcttttccttccttgagtcatagaacgtatccatctcccaggaaatgtccttctctggcgtctgcttgcccttctgagtctgccttttttgcactgaacataagcactttatactaatgggtcacaaatcttgcagcccttaatttgggataagaccagattttcctgacattttcctctaactcattgaactatcaaattataggcaaccactgactagactgatatgagatgaggctaaaagcctttgaacaccacgctgtagtctccaacagaaaaacaccaccaaaacagatacccatgttgaggggttgaatgttttactacaaacaagccacaataaagtgtctatcaacatg

SEQ ID NO: 248 - DNA, 1443 bp, Homo sapiens
ctttctttttctcttggagctgagctataagacaacaggactgaacagggagccaactgtttctttgaacagtaaatcaggaacaccaatggaccaaaatgaacacagtcactggggaccacatgcaaagggccaatgtgccagcagatctgagctgagaatcatcctggtgggcaaaacaggaactggcaaaagtgctgcagggaacagcatcctcaggaagcaagcatttgaatcgaagctgggttcccagaccttgactaagacttgcagcaaaagtcagggaagctggggaaatagagagattgtcattattgacacaccagatatgttttcttggaaggaccactgtgaagctctgtacaaagaggtgcagaggtgctacttgctgtctgcaccaggaccccatgtgctgctcctggtgactcagctgggccgctatacctcacaggaccagcaggctgcacagagggtgaaggagatctttggagaggatgccatgggacacacaattgtcctctttacccacaaggaagacctcaatggtggctccctgatggattacatgcacgactcagataacaaagccctaagcaagctggtggcagcatgtggtgggcgaatctgtgcctttaataaccgtgctgaagggagcaatcaggatgaccaagtgaaggaactaatggactgtattgaggatctgttgatggagaaaaatggtgatcactataccaatgggttgtacagcctaatacagaggtctaaatgtggacctgtgggatcagatgaaagagtaaaggaattcaaacagagccttataaagtacatggaaactcaaagaagttacacagccttggctgaagcaaactgcctaaaaggagccttaatcaaaacacaactgtgtgttttattttgtattcagttgtttctcagattgataattctgtggctttgcatactgcacagcatgtgcaatttgttttgttgcttactctttagtatgtgcaatttattctgcagtttgctgtttattatacccaaaaagttaatgatatttttgagaacagttattagactagaacgcaagactcctaggttatagttacagatcccagttattatttactcactatcatttagtgggtgaatcacagtaatttccctgtaaaatgtggtacctgaagtcatatttgagattctatgaaatgtttaaatctgaacatcactccaattattaatgaaccaaatcatacgataagttactgtttgcattgaaatataatatcaaagccttttgaaatctgtaaacataaaattcctctcattttcaaatatctaaagccagttttatgttcctaaaatctcattttcttctttctagtactactatttctactgaatataatgaaaatggcaataaaataatattacataaactgtaaa

SEQ ID NO: 249 - DNA, 1371 bp, Homo sapiens
agatcgccgaagcgtcggactaccgttggtttccgcaacttcctggattatcctcgccaaggactttgcaatatatttttccgccttttctggaaggatttcgctgcttcccgaaggtcttggacgagcgctctagctctgtgggaaggttttgggctctctggctcggattttgcaatttctccctggggactgccgtggagccgcatccactgtggattataattgcaacatgacgctggaagagctcgtggcgtgcgacaacgcggcgcagaagatgcagacggtgaccgccgcggtggaggagcttttggtggccgctcagcgccaggatcgcctcacagtgggggtgtacgagtcggccaagttgatgaatgtggacccagacagcgtggtcctctgcctcttggccattgacgaggaggaggaggatgacatcgccctgcaaatccacttcacgctcatccagtccttctgctgtgacaacgacatcaacatcgtgcgggtgtcgggcatgcagcgcctggcgcagctcctgggagagccggccgagacccagggcaccaccgaggcccgagacctgcattgtctcctggtcacgaaccctcacacggacgcctggaagagccacggcttggtggaggtggccagctactgcgaagaaagccggggcaacaaccagtgggtcccctacatctctcttcaggaacgctgaggcccttcccagcagcagaatctgttgagttgctgccacaaacaaaaaatacaataaatatttgaaccccctcccccccagcacaacccccccaaaacaacccaacccacgaggaccatcgggggcagagtcgttggagactgaagaggaagaggaggaggagaaggggagtgagcggccgcccccagggcggagatccaggagctggcggccgccgatccgatggagaaggggggacccaggccagcaggagacaggacccccgaagctgaggccttgggatggagcagaagccggagtggcggggcacgctgccgccttccccatcacggagggtccagactgtccactcgggggtggagtgagactgactgcaagccccaccctccttgagactggagctggcgtctgcatacgagagacttggttgaacttggttggtccttgtctgcaccctcgacaagaccacactttgggacttgggagctggggctgaagttgctctgtacccatgaactcccagtttgcgaattatagagacaatctattttgttacttgcacttgttattcgaaccactgagagcgagatgggaagcatagatatctatatttttatttctactatgagggccttgtaataaatttctaaagcctc

SEQ ID NO: 250 - DNA, 2168 bp, Homo sapiens
ggaagtagccgcaggcatggcggcggctatgccgcttgctctgctcgtcctgttgctcctggggcccggcggctggtgccttgcagaacccccacgcgacagcctgcgggaggaacttgtcatcaccccgctgccttccggggacgtagccgccacattccagttccgcacgcgctgggattcggagcttcagcgggaaggagtgtcccattacaggctctttcccaaagccctggggcagctgatctccaagtattctctacgggagctgcacctgtcattcacacaaggcttttggaggacccgatactgggggccacccttcctgcaggccccatcaggtgcagagctgtgggtctggttccaagacactgtcactgatgtggataaatcttggaaggagctcagtaatgtcctctcagggatcttctgcgcctctctcaacttcatcgactccaccaacacagtcactcccactgcctccttcaaacccctgggtctggccaatgacactgaccactactttctgcgctatgctgtgctgccgcgggaggtggtctgcaccgaaaacctcaccccctggaagaagctcttgccctgtagttccaaggcaggcctctctgtgctgctgaaggcagatcgcttgttccacaccagctaccactcccaggcagtgcatatccgccctgtttgcagaaatgcacgctgtactagcatctcctgggagctgaggcagaccctgtcagttgtatttgatgccttcatcacggggcagggaaagaaagactggtccctcttccggatgttctcccgaaccctcacggagccctgccccctggcttcagagagccgagtctatgtggacatcaccacctacaaccaggacaacgagacattagaggtgcacccacccccgaccactacatatcaggacgtcatcctaggcactcggaagacctatgccatctatgacttgcttgacaccgccatgatcaacaactctcgaaacctcaacatccagctcaagtggaagagacccccagagaatgaggcccccccagtgcccttcctgcatgcccagcggtacgtgagtggctatgggctgcagaagggggagctgagcacactgctgtacaacacccacccataccgggccttcccggtgctgctgctggacaccgtaccctggtatctgcggctgtatgtgcacaccctcaccatcacctccaagggcaaggagaacaaaccaagttacatccactaccagcctgcccaggaccggctgcaaccccacctcctggagatgctgattcagctgccggccaactcagtcaccaaggtttccatccagtttgagcgggcgctgctgaagtggaccgagtacacgccagatcctaaccatggcttctatgtcagcccatctgtcctcagcgcccttgtgcccagcatggtagcagccaagccagtggactgggaagagagtcccctcttcaacagcctgttcccagtctctgatggctctaactactttgtgcggctctacacggagccgctgctggtgaacctgccgacaccggacttcagcatgccctacaacgtgatctgcctcacgtgcactgtggtggccgtgtgctatggctccttctacaatctcctcacccgaaccttccacatcgaggagccccgcacaggtggcctggccaagcggctggccaaccttatccggcgcgcccgaggtgtccccccactctgattcttgccctttccagcagctgcagctgccgtttctctctggggaggggagcccaagggctgtttctgccacttgctctcctcagagttggcttttgaaccaaagtgccctggaccaggtcagggcctacagctgtgttgtccagtacaggagccacgagccaaatgtggcatttgaatttgaattaacttagaaattcatttcctcacctgtagtggccacctctatattgaggtgctcaataagcaaaagtggtcggtggctgctgtattggacagcacagaaaaagatttccatcaccacagaaaggtcggctggcagcactggccaaggtgatggggtgtgctacacagtgtatgtcactgtgtagtggatggagtttactgtttgtggaataaaaacggctgtttccgtg

SEQ ID NO: 251 - DNA, 2628 bp, Homo sapiens
gggacgctgaggggcccgaggagaccgtgaggctctggcctgcagctcgcgccgccatggacgctgccgaggtcgaattcctcgccgagaaggagctggttaccattatccccaacttcagtctggacaagatctacctcatcgggggggacctggggccttttaaccctggtttacccgtggaagtgcccctgtggctggcgattaacctgaaacaaagacagaaatgtcgcctgctccctccagagtggatggatgtagaaaagttggagaagatgagggatcatgaacgaaaggaagaaacttttaccccaatgcccagcccttactacatggaacttacgaagctcctgttaaatcatgcttcagacaacatcccgaaggcagacgaaatccggaccctggtcaaggatatgtgggacactcgtatagccaaactccgagtgtctgctgacagctttgtgagacagcaggaggcacatgccaagctggataacttgaccttgatggagatcaacaccagcgggactttcctcacacaagcgctcaaccacatgtacaaactccgcacgaacctccagcctctggagagtactcagtctcaggacttctagagaaaggcctggtgcaggcggcttgctgggggatgtgagcgctcaggacgtgatgaggtactcgtggttctggagctctagaaacacttctgatgcatgaaaaatgtgtgatggtgcaaggaatggattcaggatgttgttggagaaacaagtttgtgattagtccttaaaacttagctccctgggacattcttcaattccacatctgtttctagaaaccagccctttttccccccacttttgagaaataaaaaagccttaggtaaataagtcattctccctagcagagccacttgggtctcctgcatggaagccatcacacttgggcaggtgttcagtgactggtaggtgtagatacagcaggagtggccatgtggtccacggctttttaccccttcttgatcctgatttcttgggctgaatttagactctctcacagaggtggctcacagagaaggatggcagatggtgcagccaacaatgctgaccggtgcttatcctctaagccctgatccacaataaaaatggacccaactcagctctgactctctaggtttttgtgctgcgtaactaccaagtaaaaggactgagcctgtggctgagatgactcagtcaacgaaactgaggcacacggcagttaagtggaaactgcagaccaacacctggggtgtctccttctcttggctacttctagctcaggtttaatgggttgcttatcaagaggagagtcaggaaaaaaacgaatccaatgtattgagcatgagtgacaatgtattgagcatgagtgacaatgctagaagaaaagtcactttcagtgctgctcttgatggatttggggaaggattctttgttgtaggtaacagtgggctcaggggaaattatttttttcctaagagaaaattactttattcgtagcattttggaaatgttaggacctttacagaaattacattaccttgagaggtgaaatgatcgtccagcatcatgcaatggatagaaggttctgtaatcagctttaaaaaaaactttaatttttggccgggcacattggcttggctcatgcatgtaatcccagcactttgggaggccaaggcaggtggatcacaaggccaggagattgagactatcctggctaacatggtgaaaccccgtctctattaaaaatacaaaaaaaaaaaaatttgccaggtgtggtggcacacgcctatagtcgcagctactcgggaggctgaggcaggagaatcgcttgaacccgagaggcggaggttgtagtgagccaagattgcaccactgtactcctgcctgggcaacgagagcaagactctgtctcaaacaaaaaaaattttaactttttttttagacagggtctcgttctgtcatccaggctgcagtagagtggcgtgattatagctcactgcagcctcgaactcctgggttcacacagttctcccaccacagcctcccaaagcactgggattgcaagcatgagccgccatgcctggccagcctatttttggctggacaccagtgggccaaaagcagtggggtgctgtctggggagctctgagaatgcgcatgtgtgacaggctgagcctaaagacttatcacccagcatctgccctccagtgtctagcatgctgcacactatcactccatgttgctgcccacgtgtccccgccaggcaggttttggtggttatttggacactgaagggtcagacctggaagactgggaccaaaagatgaggtctccataatttaaggtgctgttcagacttggttcagctcataggacttgttctttcatctcagccttccttggaatcctcctgctttcatctggggatcttttagaatgaaaccacttgttattgtggagggcaaggggtcctaatgccctcctcttagagcctgagccagtggaggcagctccgtctgcggagatgtatagttattgagcttttctttgtttggctttgttttatatcataaaaaagattttcctcttaacataa

SEQ ID NO: 252 - DNA, 3679 bp, Homo sapiens
gtaggaaggcgccggccgtggaggcgccacgtcccttgcggcggcgggagagaaatcgcttggacttcggggcggcctcggacggccatggcctttaccctgtactcactgctgcaggcagccctgctctgcgtcaacgccatcgcagtgctgcacgaggagcgattcctcaagaacattggctggggaacagaccagggaattggtggatttggagaagagccgggaattaaatcacagctaatgaaccttattcgatctgtaagaaccgtgatgagagtgccattgataatagtaaactcaattgcaattgtgttacttttattatttggatgaatatcagtggagaaaatggagactcagaagaggacatgccagtagaagttattactttggtcattattggaatatttatatcttagctggctgaccttgcacttgtcaaaaatgtaaagctgaaaataaaaccagggtttctatttatctgtttttttttttaatgttgcacttgtagtttcattacaaaagatcagatcatgaaaggcagtaactctccaggactggaatatctgattgctcagtgttaatagtagttcatgctgtggtgagattgttaaaagggtgcaagactgttgcttctctttttttagatatttttctatctctcacttctcagggatgaaattctttttcaaagttttgaagttccttgcaacttagccatgatgtgagtggttatccctagataaaattaaaaggatttttaaaaagtaattactgcacataaaatgataaataggtaatttgaataattttattttaagctccttggttaattattttgtctattgtctcagctataaattcaaatttatacatactattgagtattaatattctctgatttcagggagaattctgtcagtcacatgatgattatgtttttgtttaacattctttccatgcacttgttattttattaatttgcctgaatgatgagaccagaccagtgtctacagattttcattgtcagaaaaatctataagtctgccctttttacaatgatgatttaaaaaaaacaacagcgtaaatattagcccacaagagcagtcctaaacaatcacaattacactgtactacccaagaagactgtttattgtgaagcatttacctttcaaaaaatcattacatttctatttcttggtggagcagcacattgtggagtgtgattcttaattcttcattgagtttgtcaataggacattgatgctggataggttgtcttttgtttttatgtctcagaccatcttgtgagattgtttgcctatctcataatacagttttatgcagaaaggttgaaactatgtaaatggtttttatggaaattatcagttacaatattttaaaggtgtagaatggcatctttgtttataggagaacatttgtaaataaagttaaatttctaagtcaagcacttgtttttgtaccttagtataaacctgtcagtgttaactgcattaatctccattttgggtgaacacctcttattatatgttctttgctgtaaaattgccgagtatagagttaatgaaagtaaatatttacatgtatttttttttcttcagtgaattaactgaattgctgacatacatccagaagactcatgagcaccttttatttcatgacttcagttacttctaaaactatggagcaggtattaagtaccttttggcctttcctaagttagagatcagtgatctttggactataggcttgcagctagtccaaggaaagtaccaaggattcttagttgattacttggctcatgtgaatgactaatttggtacttagaggccgtgttcttttagccttacaaagaactgatgcctgagttcaagtttgagctactgaaaagattcaaaagaagcagttacttgagggcaggcccatttccccatatggtatgagcagtacaaaattttttaaaatgaaagaaaagagagaccttgatctgatgttatttttcatataagacattacagcataccttcatcttaattcagtgttgggattttgtccaaatattccatcagggagcagtcacagaagggccaggatcaaagtattctgtagccaagtagttctgaggaaagtgaagcactgaactgaacatcaaaatatgtcatatctggaggccacttcataattccagtttgtggctgaagaggggtctgtaagctttcactggtcagccctggtttccccagagcagttgtgattcagtaaacagagtgtgttattttagtagacagtaacttaagtgcctgttggcctgcccatgtcctcccctttatctattaccaggattaacaatttgtgatgattctggactccaaataccgatgatgtttatagtccttatgtattctggccctgtgtttgcatgtctctgaactgtgcgaaggttcttggctctagtctgtagatattaaccaaattcatcgctaatcaagtacagtggttttcaaacttttatagttaacagcagaaccagattttcaaaggaattctgacacagaactgtaacattcccgtatctaaaccagatgagagtaggtccatttatttgtttttagttgaagtagagctgggattcaaaggctcactattcagcctccactgcactcttgtcaggcttcccaaggcatttccataaaaccctaaattttcaaaaatatagctaaaaagtatcttataaaaatccctgctttagccataaaaaagaattagataataccttctgtgggaacatggatggagctggaagccatcatccttaacaaactaatgtaggaacagaaaaccaaataccacatgttattacttataagtgggagctaaatgataagacctcatggacataaggagggggacaacagacactgggggctatttgagggtggagggtgagaaagagtgccagaaaaattactgggtactaggcttagcacctggataacgaaataatctgtgccaaacccccgtgacacaagtttacctatttaacaaatgtactgtacccctaaaagttaaaaaagtaaaaatataaaaaaataaaatccctgctttagggagggtgggagggggtgagggaaacagaaactacatactgagtacaatgtacagtagtccagtgatgggtgcactaaaatttcagactttacaccactatacaattcatccatgtaaccagaaaccacttgtacccctaaagctattgaaataaaaagctaaatgagttcccccaccttcctctccccatcaaaatccttgctttagatacaataagagtaggcaatctgtgttctatatgtgttagatgtgtattactggtgaaatgacaagagaaagcaagatatttgactagtaaaaagactaggaggcaagatatttctaatatatcaagcaaaccttttaccatgtgactgaaagcaaataaacttcctaagacctcagtagtttttggttgtcctatctgtaaaattggtcaataaccttcagaacagaagtctggtccagatatatatatatatcttttccagatcactaatgtttgtatctagatgtgcttcaaccaaagagatgttctccttaagtaaaatgtttcttatgaagcaaa

SEQ ID NO: 253 - DNA, 6517 bp, Homo sapiens
gctgatgcgaactggggccacggcagccatcgcgctttgcagttcggtctcctggtgtacggccaacgccaagtaggggattgcgttccctccagtcgcagaccctatcagatttggatatgtccttcatatttgattggatttacagtggtttcagcagtgtgctacagtttttaggattatataagaaaactggtaaactggtatttcttggattggataatgcaggaaaaacaacattgctacacatgctaaaagatgacagacttggacaacatgtcccaacattacatcccacttccgaagaactgaccattgctggcatgacgtttacaacttttgatctgggtggacatgttcaagctcgaagagtgtggaaaaactaccttcctgctatcaatggcattgtatttctggtggattgtgcagaccacgaaaggctgttagagtcaaaagaagaacttgattcactaatgacagatgaaaccattgctaatgtgcctatactgattcttgggaataagatcgacagacctgaagccatcagtgaagagaggttgcgagagatgtttggtttatatggtcagacaacaggaaaggggagtatatctctgaaagaactgaatgcccgacccttagaagttttcatgtgtagtgtgctcaaaagacaaggttacggagaaggcttccgctggatggcacagtacattgattaacacaaactcacattggttccaggtctcaacgttcaggcttactcagagatttgattgctcaacatgcataacttgaattcaatagacttttgctggttataaaacagatgttttttagattattaatattaaatcaacttaatttgaatgagaattgaaaactgattcaagtaagtttgagtatcacaatgttagctttctaattccataaaagtacttggtttttacagtttataatctgacatcaccccagcgccatttgtaaagagcaactttccagcagtacatttgaagcactttttaacaacatgaaactataaaccatatttaaaagctcatcatgttaaattttttatgtacttttctggaactagtttttaaattttagattatatgtccacctatcttaagtgtacagttaataattagcttattcaatgattgcatgatgccttacagttttcaataactttttttcttatgcaaacgtcatgcaataaaacaaactctaatgtttggcatccttgttgggcaaatgtttcatttaaatgtgtcttatctagctagtatactctgaaaatttgagtatttaatattaggcatatgaagtggttgttgggaaaggagattccttcagaatatttagaatagcgtttaaggctctcaaggcttaggtatttaccatgagatggttgtggtcagttgcacctgataccatgtatccctgaatcatgtgtatttttattagtaatgcagccactaccattgctgatggggtctgtgtcctagtccctgtgggattggccttctgaagaaaagcacatttatggtacacaaggttgattctcagtttggtaggctctatagttccatcccagctgtctaattctgaagtgctccagtcttattggtgcccaatggggtaatctgtgcctcttccccaaaagcaatgacaggcaccagtgtctccacatttagatatattcccagtctctgtacatttaacagtactctctggggcaagcaataagtaggaccttgtgtgcagtttcattgtagagacatgtatatctgaggaataaaacagcttgttctgtgtcagtctgagatatgtggagattttgttcctatcctatagctcttttgtattctttggcatattttatatcctggtagaagaaaacaagtgcttgtttccaattttcttttttcttatttgctctcaggtagttcttactccatacaacaaagactttttgtttgttgggctttttttttttttttttttttgctctgtttcattttgttttagagacggggtttcaccatgttgtccaggctggtctcaaactcctgacctcaagtgatctgcccgccttggcctcccaaagttctgggattataggcgtgagctaccatgcctgacctgacttttgtttttagatattatgcttgccatgtgatagggcctgcaagcctcattgctaggcttactaagaaaattttagtttttcaaaagcattataatttcctaagaaactgaattctttttttatatgtttgagattcccatcattagtaatataagatgaaaggtaagtgccaaaaatgtatttttaaagaccctcaagtttaagatttatcctgattataagccaagttttatagtatatttaaccaattccatcaagaataattttaatatcaaaaattagtgttttctgtagccattgtccatgtcagagttacagtcctttttgtcattgataatataacctatgaagcagataaggattgaggaatatgactggaaggaattactatttagctaagctgacaaggtcgcttcttaagatgacatttggtttcagtaatctgactattctgttttcactttcatcttctttctaaatgaaaacaaaagtgctccctcccttcctggaaacctcagtaacactatgggaaaagtagaacatgacattgcagcctattgatttcttcttccagataggtttaaagtactccttaagttctgactaaatagaactaagccttattaaaaataactgcctcttgttcatgttatctgtaccttcagggacctgcctttcttcaagtatttcctagagtatctattatgatactgaagaagctaattatttgtgttgtaaatgggtataaatgaaaaaaaaacatactggtttctctagccaggaaaaatgctttctggtgtaatatatcttgctccagaaccctcattctaattgtaacactaggatcaaagaaacaaagtcactttgtggaccacagctaaactgtggatattttcccaaagacataagatttttatggcccgagcctctagaaaggaagccatgtttaggagcaaccagctttcctcccagctttagggggcagagttcctgagccagaggacttactgtccagctttgagaacctctccagagtatatgcactgggtactgctctttttcaagagaaccaaattaagaggatggcaagaaacagtagaagcacagaggaaagacaactctgcatgtgcctgtgtgaatgtgtgcatccatggagtatttcccaggtaaatactagtactggggacataggctaattgtgtgtcccacactgcaagatgctagggcgtagttaacactgtggtatacatacaaatcaggcactgtccaaaagattttttaaaatctaaagtctgaaatgtaaaaatataaggtctcaacccacttttacacttttaaagagatcccatacctgtttcactgactgccgttaattacacttttggatcacagctggttaaattgatagatttcagtttatctcagtgaatttttagaatggagattatagcattttttaattggagaacagacatttcctaaagtatatgaaaaaaaattattcactgttggtttaaaccagtatctttgtatgagtgccaaagatatatgaacacagatactgcctgtgcagacctaaattttagttttgtgtacctggatccatatacaaattttttgtggtttatagcataaaagcagaacgttgtttctttcttagttttcaaccggctcatcttttgtttttgttttttgtttttttgttttttgttttttttgagatggagtcttgctttgttgcccaggctagagtgcagtggcacaatctctgcttactgcaacctccacctccggggttcaagtgattctcctgcctcagcctcctgagtagctgggactacaggcgcgcaccaccatgcccggctaatttttgtatttttagtagagatggggtttcactatgttggccaggctggtctcgaactcctgacctcgtgatctgcccacctcagcctcccaaagtgctgggattacaggcgtgagccgccatgcccggccaattttcaactggcccatactttatagtgatggaaagcgcataaactacttgtaaatcattaaaatagggtgataactgtgataatagtgtttcttgcattctagaaaattattttattaactacattcaaaacccagcatttcacaggttccatcattagaaacagtatagttctagttaacatgattggagagtttcaggggaaaggtttacattttctgaaactgtatttggtatgtgactcaatgtggtatttcagtcttgttagtcacttacatgactgacgtttgcaaggatttattgccaagtaaaatttgaccagagtgcactgagaatagctacataaggggaaatctctcaaaattccttctgttcatttaatttggagcatattgtttaaatcattttaaacatatgtaaaaagttgaagcattaaaaaatcttcaagaaacaatgaaaaaatagaaattagcaaacataagtttcttaatgcaaaattaatagtgaataaaatatagcctacattaaaagccagaggctttgctataaatataagagtttagaaaaacagtgtgcttcaattaaggactaaattatcaaaactgcatgtttgttttttcttttcttttcttttttttttgagatgaagtctcactctgttgcccaggctggagtgcagtggtgcgatcttggctcactgcaacctctgcttcccaggttcaagcgattctcgtgcctcaccatcccgagtagctgggattacaggtgcaccacaccatgcccagttaatttttgtatttttagtagagacagggtttcattatttggccaggctggtctcgagctcctgatcttaagtgatccactcgcctcggcctcccaaagtgctgggattatacacatgagccactgtgcccagcctaaaactacatgttgaagcttccggtcatttccattattatccttcttttgaaattcaagttagtgctttttaaccaaataaaagaagaaccagctcttgggatatgtgactctgcctctgtataaagtgactggaattttgttaaaaccgtgtttccacttctgaaccctgttaccattccccctcacaaatccccacccaacacctggattttaaagatcctccagtgtcaagggaagccacagagtctattaaagaggcagttctgaaccaattaatttttgtccttataatttagagcattaaatagctaatatatttaatggcactaattgttgttcacggctttcatcatacttttaaacagaatccaaagtattcaaaggaaagtaagcgaagttatccaaagccaactttgtttcaggtgtgtcccctgccccaaatagattttagggcagaaatagaaaactgagtttacacagaactatttttggaaaagctgcactggagtagatggattcttcttcagcatacttttttgtttgtttgtttgagatggagtcttgctttgtcacccaggctggagtgcagtggtgtgatctccactcactgcaacctccacctcccagcttcaagtgattctcctgcctcaaccttccaagtagcttggattacaggcgtgcgccaccacagctggctaatatttgtattgttagtagagacagggtttcaccatgttgtccaggcttgtcgaacttctgacctcacgtgatccacctgcctcagcctcccaaagtgctagattataggcgtgaaccactgcgcccggccagcatgcattttaaaagtggcttagatttagttttaaatattttggggtgaaaggcaggaacagttctgtttttgacatacaggttttctttgggattgttttcattttcaagtatagattcatgtcagaatggccaacttaacgtgggtttctgtattccctggtgttgctcttaacctgaactcataatcagttgccatactgaggcaagagcactcagggtgaacatagtcaagttactttaaaagtgataaaagtgtttttccatggtgaaaccttcagtatttggctgaatgtaaagtatgttgaagtggtatattgatggtaagttgttaatcactaaccttgtttgcacttttgtacaccactgcttgcactaggatcttggtgtgaattttcaattgttttacagtgtatacagattattaaggataatttatataaagatgtttctgtttaactttgtgtgttttacaacaaagagctataatagatggttaaacgtttttgaattgtgtttatatgttagtttgattatgttctattatcttttcacctgccatgaatttgagtgttaggaagggaaaaataaaatactaatctggtcttgaagaa

SEQ ID NO: 254 - DNA, 3145 bp, Homo sapiens
gctggcctcacccggaatgaaaacaaacggcggccgctgccgcatccgggcactctgctggtcgcggcgggagtggcgtggcgcagggatggcacaaaagaaatatcttcaagcaaaattgacccagtttttaagggaagacaggattcaactttggaaacctccatatacagatgaaaataaaaaagttggtttggcattaaaggaccttgctaagcagtactctgacagactagaatgctgtgaaaatgaagtagaaaaggtaatagaagaaatacgttgcaaggcaattgagcgtggaacaggaaatgacaattatagaacaacgggaattgctacaatcgaggtgtttttaccaccaagactaaaaaaagataggaaaaacttgttggagacccgattgcacatcactggcagagaactgaggtccaaaatagctgaaacctttggacttcaagaaaattatatcaaaattgtcataaataagaagcaactacaactagggaaaacccttgaagaacaaggcgtggctcacaatgtgaaagcgatggtgcttgaactaaaacaatctgaagaggacgcgaggaaaaacttccagttagaggaagaggagcaaaatgaggccaaactcaaagaaaaacaaattcagaggaccaagagaggactagaaatactggcaaagagagcagcagagacagtggtggatccagaaatgacaccgtacttagacatagctaaccagacaggcagatcaatcagaattcccccatcagaaagaaaagcccttatgttagctatgggatatcatgagaagggcagagctttcctgaaaagaaaagaatatggaatagccttgccatgtctgttggacgctgacaaatatttctgtgagtgttgcagagagctgctggacacagtggataactacgccgtcctccagctggatatagtgtggtgttacttccgcctggaacagctggaatgccttgatgatgcagaaaaaaaattaaacttggcccagaaatgctttaaaaattgttacggagaaaatcatcagagactggtccacataaaaggaaattgtgggaaagagaaggtactgtttctaagactctacttacttcaagggatccgaaactatcacagtggaaatgatgtagaggcttatgagtatcttaacaaggcacgtcagctctttaaagagctatatattgatccatcaaaagtggacaatttgttgcagttggggtttactgcccaggaagcccggcttggcctgagggcgtgtgatgggaacgtggatcatgcggccactcatattaccaaccgcagagaggaactggcccaaataaggaaggaggaaaaagagaagaaaagacgccgcctcgagaacatcaggtttctgaaagggatgggctactccacgcacgcggcccagcagattctgctcagcaatcctcagatgtggtggttaaatgattccaatcctgaaaccgacaaccgtcaagaaagtccttcccaggaaaacattgaccgattggtgtacatgggttttgatgcactcgtggccgaagctgcgctgagagtgttcagaggcaacgtccagctggccgcccagacccttgctcacaacggaggaagcctgcctcccgagctgccgctgtcgccagaagactctttgtccccgccagccacgtccccttctgactccgcaggaacctctagtgcctcaacagacgaagacatggagacagaggccgtcaatgagatactggaagacattccagagcatgaggaagactatcttgactcaactctggaagatgaagaaattattattgcagagtacctatcctatgtagaaaataggaagtcagcaacaaagaaaaactaaataatgaacagaaatagcgctaattttctgcttataaatgctatcattatgaaaaggctaatgcagctctttctgttcttactttttatctgaattacaagtcctctttgggtgtaggagggggtgggcaggggacaagtccaggaggggtcccagggccttcatgcgtggtctcggggaagaagcttcctctggcctggcgcaggccgttccatctgcctcccaggtctgcgtccctaaccccttccccagcttggtgttttaccccgaaacaggaaggaacaggggtcctgtagaacaggggtcctggggaaggtgtccagggcagggtcctgggaagggtgtcccgaccgcttcctctccagctgtggctccatctgcccagcttgcctgcctcctgcacccactgccctgaccttcctgcttcccacgctgccatctctgccagggtgccacatgggttcctgtgccaccctttccccgcccctcaaatcgtcctttaagtcttccttccaagtgctgtggggcataacgatgaggcgctggccttgggggccacaccaggtcgcagcaaatggcttcagcctgggacgccagtgttttatgctcttagttcagtaaaatacgcccccgaaattcaagattgagtgtcaggctttatatatattcagcattcctcattacagaaatcttctattgaatgggaaaggtttaaatgctaaccaaagcaatttatttttaattaatatttttagactctgtgctgtcatactgaactcactgctagctaagagacctatcagagatttagatatattttctccaggttttttgtgggttttctttgttgttgttgttgttctagccatgtgacagaggctctttctaaaagtatgtagttcgctgtgtgtcggctccagcagtaaccgtcctcactgcgccacgcactcctctgtagatgtgtgcccagtgggagttccttccagccccaggaccacagcagcagccaggtgccgagtggattgagtgccaggtgcatccaagactttccctcccttccagaaggcactgactgaagacaggatggatcatgcggagccggctgaaatgctccaactttttcaaagtgtgggtggtccagtttggactgatgggaatcttcttgtcattctttttaaacggatgataccgatggaaataaaaggtgggaaatatattcaaaaattgtcaccctaaaaaaaaaaaaaaaaa

SEQ ID NO: 255 - DNA, 1605 bp, Homo sapiens
ccagttctcggagccaggttaggggtttggcggaggaggactgcggggcgcgggcctagggccccagcagccacagccaggggagcgctcaagacagaaagccggtggcttcctcacctccacctgtaatgcaggagggagaattggctatttctcctataagccctgtggcagccatgcctcccctaggcacccacgtgcaagccagatgtgaagctcaaattaacctgctgggtgaaggggggatctgcaagctgccaggaagactccgcatccagcccgcactgtggagcagggaggacgtgctgcactggctgcgctgggcagagcaggagtactctctgccatgcaccgcggagcacgggttcgagatgaacggacgcgccctctgcatcctcaccaaggacgacttccggcaccgtgcgcccagctcaggtgacgtcctgtatgagctgctccagtacatcaagacccagcggcgagccctggtgtgtgggcccttttttggagggatcttcaggctgaagacgcccacccagcactctccagtccccccggaagaggtgactggcccctctcagatggacacccgaaggggccacctgctgcagccaccagacccagggcttaccagcaacttcggccacctggatgaccctggcctggcaaggtggacccctggcaaggaggagtccctcaacttatgtcactgtgcagagctcggctgcaggacccagggggtctgttccttccccgcgatgccgcaggcccccattgacggcaggatcgctgactgccgcctgctgtgggattacgtgtatcagctgctccttgatacccgatatgagccctacatcaagtgggaagacaaggacgccaagatcttccgagttgtggatccaaatgggctcgccagactctggggaaatcacaagaaccgggtgaacatgacctacgagaagatgtctcgtgccctgcgccactattataagcttaatatcattaagaaggaaccggggcagaaactcctgttcagatttctaaagactccgggaaagatggtccaggacaagcacagccacctggagccgctggagagccaggagcaggacagaatagagttcaaggacaagaggccagaaatctctccgtgaggggcaggtggactccaggcacccggtaccgatggggcagggaccgagtctcccatgaaggcagactcctcctcccagcagagcagcaggatccccagccagactctgtacccacaggattacagccattgcttgggaaggctgggaggcctcccatccaggacactgggggcaggagtgtcatcttttgggcagggcaatcctggggctaaatgaggtacaggggaatggactctcccctactgcacccctgggagaggaagccaggcaccgatagagcacccagccccacccctgtaaatggaatttaccagatgaagggaatgaagtccctcactgagcctcagatttcctcacctgtgaaatgggctgaggcaggaaatgggaaaaagtgttagtgcttccaggcggcactgacagcctcagtaacaataaaaacaatggtagctga

SEQ ID NO: 256 - DNA, 3279 bp, Homo sapiens
attctgcggccgaggattacatttatgcacgaacgggcttactggttccagattccccacttgggcacaggcataggaggcttgttttccaaattgctggttttaattgcacctgcctttcagattacctctgggaatctgtgggaggagccgagagggtggaaaatgtttcttagctttgcaaaaggaagaaaactttgtcacccagcgggagacctcagccacgagtaacccggggagacaccagaaccgggacgggctttgactgatttgcctacgagggttccgtaggaaaggacgcttgaattcggcgcttcggcggcggcggcggccgcgcgagttccctgctcaccctccctctccgcggaagtccccacgaggtggcttcagggtgtaacagagcgcgcggctccagtccgaaggcagcggccgggggagggaaggaggggaccgaacccccgaggagtttcgcagaatcaacttctggttagagttatgggaagcgcggttatggacaccaagaagaaaaaagatgtttccagccccggcgggagcggcggcaagaaaaatgccagccagaagaggcgttcgctgcgcgtgcacattccggacctgagctccttcgccatgccgctcctggacggagacctggagggttccggaaagcattcctctcgaaaggtggacagccccttcggcccgggcagcccctccaaagggttcttctccagaggcccccagccccggccctccagccccatgtctgcacctgtgaggcccaagaccagccccggctctcccaaaaccgtgttcccgttctcctaccaggagtccccgccacgctcccctcgacgcatgagcttcagtgggatcttccgctcctcctccaaagagtcttcccccaactccaaccctgctacctcgcccgggggcatcaggtttttctcccgctccagaaaaacctccggcctctcctcctctccgtcaacacccacccaagtgaccaagcagcacacgtttcccctggaatcctataagcacgagcctgaacggttagagaatcgcatctatgcctcgtcttcccccccggacacagggcagaggttctgcccgtcttccttccagagcccgaccaggcctccactggcatcaccgacacactatgctccctccaaagccgcggcgctggcggcggccctgggacccgcggaagccggcatgctggagaagctggagttcgaggacgaagcagtagaagactcagaaagtggtgtttacatgcgattcatgaggtcacacaagtgttatgacatcgttccaaccagttcaaagcttgttgtctttgatactacattacaagttaaaaaggccttctttgctttggtagccaacggtgtccgagcagcgccactgtgggagagtaaaaaacaaagttttgtaggaatgctaacaattacagatttcataaatatactacatagatactataaatcacctatggtacagatttatgaattagaggaacataaaattgaaacatggagggagctttatttacaagaaacatttaagcctttagtgaatatatctccagatgcaagcctcttcgatgctgtatactccttgatcaaaaataaaatccacagattgcccgttattgaccctatcagtgggaatgcactttatatacttacccacaaaagaatcctcaagttcctccagctttttatgtctgatatgccaaagcctgccttcatgaagcagaacctggatgagcttggaataggaacgtaccacaacattgccttcatacatccagacactcccatcatcaaagccttgaacatatttgtggaaagacgaatatcagctctgcctgttgtggatgagtcaggaaaagttgtagatatttattccaaatttgatgtaattaatcttgctgctgagaaaacatacaataacctagatatcacggtgacccaggcccttcagcaccgttcacagtattttgaaggtgttgtgaagtgcaataagctggaaatactggagaccatcgtggacagaatagtaagagctgaggtccatcggctggtggtggtaaatgaagcagatagtattgtgggtattatttccctgtcggacattctgcaagccctgatcctcacaccagcaggtgccaaacaaaaggagacagaaacggagtgaccgccgtgaatgtagacgccctaggaggagaacttgaacaaagtctctgggtcacgttttgcctcatgaacactggctgcaagtggttaagaatgtatatcagggtttaacaataggtatttcttccagtgatgttgaaattaagcttaaaaaagaaagattttatgtgcttgaagattcaggcttgcattaaaagactgttttcagacctttgtctgaaggattttaaatgctgtatgtcattaaagtgcactgtgtcctgaagttttcattatttttcatttcaaagaattcactggtatggaacaggtgatgtggcataaggtgagtgcacggtatgttcagatcacagtgccttatgtccgaatacagcaatatgtcaccgccgcagccggggcgcacgcgtgtgaaacaacaccgagcttgaatgtggaagtctttgaaccttttaccaaatcagtttgttttctttagatttgtcaaaaagttgtaatttgaatataaataattactttaaaattgtaatgacacttttacacgtaagtgttttgttctgggctaccgtgtcaacgaggctgctttacaacagctttatttatttttactttcatgcaatttttttacacatcttttggtggagtaaacttcaccacatccatgaataaactctcagttattttgaaatggcaaatttctcattatttaagtttggatctggaaaggacatgacttctgaaatagccgctgctgggttttaaaagctgaggtctctcaaagtgtggaggagacgttgccgtcaggcgggagccaagtgccgggaagatgtctattttttttcttgtgtattgaaatgtaaaatcatgatgtttgttatgactgctgatgcgattgtttttgtaaattttattgtggcatatacagtattgtcatacagttgaagagaaacaatgtttcctaatgtaagtgctctgaaaatgttgacactgtatatatatatatgaggatagtttgttttttttttgttttgggtttttttttttcagattgaaaaattaaaatagatcctactatcta

SEQ ID NO: 257 - DNA, 4726 bp, Homo sapiens
gttgacgcctgcggttgctgcggtggtgacggggctgttggggaggggccattgggggagggaaacggagcagtgacaggtatcccagagggtgctgctgaggcgacgatggccgaggggcccgaggaagcccgaggccaccctcccgggcaggacgatggcggaggggaccacgagcccgtcccttccctgagaggccctcctaccaccgccgtcccatgcccccgcgacgacccccaggccgaaccccaggccccgggccggcccacagccccgggcctcgcggctgccgccgcagccgacaaattggagccgccgcgcgagctcaggaagcgcggggaggcggcctccggctccggtgcagagctgcaggagcaggcgggctgcgaggcgcccgaagccgcggcgccacgagagagaccagctcggctgagcgcccgcgagtactcccggcaagtgcacgagtggctgtggcagtcctactgcggctacctcacctggcacagcggcctggccgccttcccagcctactgcagcccccagccctccccgcagagcttcccttcgggcggcgctgcagtcccccaggccgcggcgccgccgcccccgcagctgggctattacaaccccttctacttcctgagccccggggccgcggggcctgacccgcggacagctgccggcatcagcacccctgctccagtcgcgggcctgggaccccgggctcctcacgtgcaggcgtcggtccgggccactccagtgacgagggtaggatccgcagccccttcgcgaagcccgagcgagaccgggcgacaggcaggcagagaatatgttattccatccttggcccacagatttatggcagagatggtggatttctttattctcttctttataaaagcaaccattgtcttaagcattatgcacctcagtgggataaaggatatctctaagtttgctatgcattatataatagaagaaatagatgaagacacatcaatggaagacttgcagaaaatgatggttgtggcacttatatacagattattagtttgtttctatgagataatttgcatttggggagcaggtggagctaccccagggaagttcctgctggggcttcgagttgtgacatgtgatacatcagtgcttattgcaccaagtcgggttttagtgattccttcctcaaatgttagcattacaacgtccactatccgagctttgatcaagaatttttcaattgcttcttttttccctgctttcatcacactgctgttttttcagcataatcgaacagcttatgacattgtagcaggaaccattgtggtaaaaagaaatggggtcagatgatgccccccaaaaccctgatttccacacactaagactaaattatgtatcaaggccatcagtatccctgggttacactaattgatgatttagaaattaaagcagtcactccagtgtgatgcaggtgactactctgaaagtattgattatacttgaatgccaaagaacttgtccagaagaaaaacctgttaaattcaagtattaaaatttttagatcaaaaaggcaaatgattttataaacaatggacaatatatactttcttaagatctaaggtactttcttaagatctaagaatttgctgaaagcattttcagctttgaaatctccaaatgaaactttaaaatttattttggtttatcccaaaataatggaaaatgtccagttgtgttttgtaaacacctatgtaactcatcttttagtttacacttcctggggaaattgtctttggtgtttagaggagggaatgagaacacaaattggataatccactgtctcccatcccaggaggtggtgagttggctacaagagaaagggacaagtgaggcaggcctagcagttcccttacctgaagttttcaaatccatactgcagttccctctcgtaatgatgtaactttacaactattcttaatgcttgaacatgtatttaggggcaagtttctcatgatgatgaaaaagtatcaagtcatattgctatgttaattggtttttttttttaaaaggtaagttagtgattactgttaatggtgggggagtaagttttcactgtaaattgaacttataatttatgtgcaagtgttttcagtgccctgaatcaaactataaatgtggggagaaatcacctccatcaaacagttgcatatttactgtaaaagtattcccagtatgtgtgcagcatgaagaaagtattagtgcttctcagtgttctcagtgtaaattctatttatatacagcatattcacatactactttccttatattttatatagttctatgactgttgaaacatcaaggagttaaaaaaatcttaatatttcatgattaactctaagtactattaattaatagcttgcgaaatattagcaattttcccattatggactattctctctaaagcaagagagactagcattcccagacatcattctagggtctttaagctcattttgggtctgctaaagtttggggggaaatgttacgcaaagtgatactgtgtatgttgccattttgctttattcttctgttgaagcaaaattgtggggttttattatgtgtgtgtgcttttcctagatgtcccagttagctgtgctgagatatacctgtactatttatggtttaagttttgattcttaggtattttctccagctctgacattgttttccaaagacacactaaactgcattgcacagttcaaaatttgattacttaagggatcaatctaggtggtgttcttggtcttaaatttaacagcaaacacagcacatatctattatcactatattaattttcaaaggtttttctttgacgtttaaaactgtgacaacagatattcacatttgattatagaaacttaatgtctattaataattttagtacaaaatttcataaaccgtgtttttcaaaataagtttatgtcaaatccagcttcccagaaacactaataattaagtacatcaatgtactaaataaatcattcagttgcacccatggggaagattgtgttactgcccttcacagtgaaaaaaagaaaaatctttcatttttaaaattaggagatgttacgtaacttggcactttagtagtgtatacactagcattagtttatacaccacttttgccgctggggaattcaagttgaaatgtccctcaatcatataggtctggaatacatctttcattcataatttctgctcagataattgaatagtttgccatcgagattattttcatttatactataaaacaaaagcaaactagtccagtttaattttttgtacttagaatattgcacattttctatatatgagttattcagattagtatctatgtaggttcagtcagatccaaccatggattcgaggtattatactgtataaccctacaaaatacatagaagtattatttgccttcataatagaacccaagagtctgtttcaatttatgaattcagtatttgcaccgagattttgattcccaaagtttggaaaaaaatgacaaaacaacgagggaagaaggaaccagaccttagtgccacatatttttctcttggggttgtaaggtagtctcctgctttccagaacactttattatatttcacttatagacctgattttctgtgtcaaagtataattctcatgctgaagctgtagcctaaaaagccaaaagaaagttgtcttcattgtacaaacatattcatcactttaacaataagggaacaaaatttagtattcaagctgagtgagaatactgtttcaatgagcatgtccctaagataaaccagaattggcagttaatttaggcgtctagaaaatctcagttcccaccagtaaaattatcctgagtagctaatgcaccttgagaaaaatctggcatactgaataaataacattaacttgggagccaagagctgggtaagccttacctttagactactctgtgactacagaaataaagccagcacttttggaactaataagccttcacttgtcagtatcataaagagtattgcccaactgaactttgctcccactggtttaatagttacttatttctgcctaagcactcaccttccgattttacccaagtatatatataggatagaaaaaaatgcattatatttgagagctacttcgcccaaattacaaaatgagtgtttttagattcaagtgacagtaaaaggatttgttcccttcagtgacttgagtgttttagttatgcataagtatttctagcaaaggaagggtagaaaggaattgaaaattaatttacactagttgctacttgggaataaagggctttttgaggggggtatggatattaaatgttttcgttatatacttatccctattaaaacaggcagttgtttctttgaatatgcctaaataacagtattcttaaaatctgacagacaagtaacatgtcaattacttgatattccttgtctccagtaccacaggccactcttgacatcccatgtttgcctggataaagttcctcatttcaaacagtatacatacttctttgcagttcattatagtaaggcttaacctgtaaacagtatctgatggcccacctataaataaaattcagcattctatttttaataatttgtatgccaccaatttgtattatttgtctcaataaatacttagtcatcaa

SEQ ID NO: 258 - DNA, 3511 bp, Homo sapiens
agtagctgaggctgcggttccccgacgccacgcagctgcgcgcagctggttcccgctctgcagcgcaacgcctgaggcagtgggcgcgctcagtcccgggaccaggcgttctctcctctcgcctctgggcctgggaccccgcaaagcggcgatggagcggaggtcgcggaggaagtcgcggcgcaacgggcgctcgaccgcgggcaaggccgccgcgacccagcccgcgaagtctccgggcgcacagctctggctctttcccagcgccgcgggcctccaccgcgcgctgctccggagggtggaggtgacgcgccaactctgctgctcgccggggcgcctcgcggtcttggaacgcggcggggcgggcgtccaggttcaccagctgctcgccgggagcggcggcgcccggacgccgaaatgcattaaattaggaaaaaacatgaagatacattccgtggaccaaggagcagagcacatgctgattctctcatcagatggaaaaccatttgagtatgacaactatagcatgaaacatctaaggtttgaaagcattttacaagaaaaaaaaataattcagatcacatgtggagattaccattctcttgcactctcaaaaggtggtgagctttttgcctggggacagaacctgcatgggcagcttggagttggaaggaaatttccctcaaccaccacaccacagattgtggagcacctcgcaggagtacccttggctcagatttctgccggagaagcccacagcatggccttatccatgtctggcaacatttattcatggggaaaaaatgaatgtggacaactaggcctgggccacactgagagtaaagatgatccatcccttattgaaggactagacaatcagaaagttgaatttgtcgcttgtggtggctctcacagtgccctactcacacaggatgggctgctgtttactttcggtgctggaaaacatgggcaacttggtcataattcaacacagaatgagctaagaccctgtttggtggctgagcttgttgggtatagagtgactcagatagcatgtggaaggtggcacacacttgcctatgtttctgatttgggaaaggtcttttcctttggttctggaaaagatggacaactgggaaatggtggaacacgtgaccagctgatgccgcttccagtgaaagtatcatcaagtgaagaactcaaacttgaaagccatacctcagaaaaggagttaataatgattgctggagggaatcaaagcattttgctctggataaagaaagagaattcatatgttaatctgaagaggacaattcctactctgaatgaagggactgtaaagagatggattgctgatgtggagactaaacggtggcagagcacaaaaagggaaatccaagagatattttcatctcctgcttgtctaactggaagttttttaaggaaaagaagaactacagaaatgatgcctgtttatttggacttaaataaagcaagaaacatcttcaaggagttaacccaaaaggactggattactaacatgataaccacctgcctcaaagataatctgctcaaaagacttccatttcattctccaccccaagaagctttagaaattttcttccttctcccagaatgtcctatgatgcatatttccaacaactgggagagccttgtggttccatttgcaaaggttgtttgtaaaatgagtgaccagtcttcactggttctggaagagtattgggcaactctgcaagaatccactttcagcaaactggtccagatgtttaaaacagccgtcatatgccagttggattactgggatgaaagtgctgaggagaatggtaatgttcaagctctcctagaaatgttgaagaagctgcacagggtaaaccaggtgaaatgtcaactacctgaaagtattttccaagtagacgaactcttgcaccgtctcaatttttttgtagaagtatgcagaaggtacttgtggaaaatgactgtggacgcttcagaaaatgtacaatgctgcgtcatattcagtcactttccatttatctttaataatctgtcgaaaattaaactactacatacagacacacttttaaaaatagagagtaaaaaacataaagcttatcttaggtcggcagcaattgaggaagaaagagagtctgaattcgctttgaggcccacgtttgatctaacagtcagaaggaatcacttgattgaggatgttttgaatcagctaagtcaatttgagaatgaagacctgaggaaagagttatgggtttcatttagtggagaaattgggtatgacctcggaggagtcaagaaagagttcttctactgtctgtttgcagagatgatccagccggaatatgggatgttcatgtatcctgaaggggcttcctgcatgtggtttcctgtcaagcctaaatttgagaagaaaagatacttcttttttggggttctatgtggactttccctgttcaattgcaatgttgccaaccttcctttcccactggcactgtttaagaaacttttggaccaaatgccatcattggaagacttgaaagaactcagtcctgatttgggaaagaatttgcaaacacttctggatgatgaaggtgataactttgaggaagtattttacatccattttaatgtgcactgggacagaaacgacacaaacttaattcctaatggaagtagcataactgtcaaccagactaacaagagagactatgtttctaagtatatcaattacattttcaacgactctgtaaaggcggtttatgaagaatttcggagaggattttataaaatgtgcgacgaagacattatcaaattattccaccccgaagaactgaaggatgtgattgttggaaatacagattatgattggaaaacatttgaaaagaatgcacgttatgaaccaggatataacagttcacatcccaccatagtgatgttttggaaggctttccacaaattgactctggaagaaaagaaaaaattccttgtatttcttacaggaactgacagactacaaatgaaagatttaaataatatgaaaataacattttgctgtcctgaaagttggaatgaaagagaccctataagagcactgacatgtttcagtgtcctcttcctccctaaatattctacaatggaaacagttgaagaagcgcttcaagaagccatcaacaacaacagaggatttggctgaccagcttgcttgtccaacagccttattttgttgttgttatcgttgttgttgttgttgttgttgttgtttctctactttgttttgttttaggcttttagcagcctgaagccatggtttttcatttctgtctctagtgataagcaggaaagagggatgaagaagagggtttactggccggttagaacccgtgactgtattctctcccttggatacccctatgcctacatcatattccttacctcttttgggaaatatttttcaaaaataaaataaccgaaaaattaa

SEQ ID NO: 259 - DNA, 2263 bp, Homo sapiens
gtggcgccagggatttgaaccgcgctgacgaagtttggtgatccatcttccgagtatcgccgggatttcgaatcgcgatgatcatcccctctctagaggagctggactccctcaagtacagtgacctgcagaacttagccaagagtctgggtctccgggccaacctgagggcaaccaagttgttaaaagccttgaaaggctacattaaacatgaggcaagaaaaggaaatgagaatcaggatgaaagtcaaacttctgcatcctcttgtgatgagactgagatacagatcagcaaccaggaagaagctgagagacagccacttggccatgtcaccaaaacaaggagaaggtgcaagactgtccgtgtggaccctgactcacagcagaatcattcagagataaaaataagtaatcccactgaattccagaatcatgaaaagcaggaaagccaggatctcagagctactgcaaaagttccttctccaccagacgagcaccaagaagctgagaatgctgtttcctcaggtaacagagattcaaaggtaccttcagaaggaaagaaatctctctacacagatgagtcatccaaacctggaaaaaataaaagaactgcaatcactactccaaactttaagaagcttcatgaagctcattttaaggaaatggagtccattgatcaatatattgagagaaaaaagaaacattttgaagaacacaattccatgaatgaactgaagcagcagcccatcaataagggaggggtcaggactccagtacctccaagaggaagactctctgtggcttctactcccatcagccaacgacgctcgcaaggccggtcttgtggccctgcaagtcagagtaccttgggtctgaaggggtcactcaagcgctctgctatctctgcagctaaaacgggtgtcaggttttcagctgctactaaagataatgagcataagcgttcactgaccaagactccagccagaaagtctgcacatgtgaccgtgtctgggggcaccccaaaaggcgaggctgtgcttgggacacacaaattaaagaccatcacggggaattctgctgctgttattaccccattcaagttgacaactgaggcaacgcagactccagtctccaataagaaaccagtgtttgatcttaaagcaagtttgtctcgtcccctcaactatgaaccacacaaaggaaagctaaaaccatgggggcaatctaaagaaaataattatctaaatcaacatgtcaacagaattaacttctacaagaaaacttacaaacaaccccatctccagacaaaggaagagcaacggaagaaacgcgagcaagaacgaaaggagaagaaagcaaaggttttgggaatgcgaaggggcctcattttggctgaagattaataattttttaacatcttgtaaatattcctgtattctcaacttttttccttttgtaaattttttttttttgctgtcatccccactttagtcacgagatctttttctgctaactgttcatagtctgtgtagtgtccatgggttcttcatgtgctatgatctctgaaaagacgttatcaccttaaagctcaaattctttgggatggtttttacttaagtccattaacaattcaggtttctaacgagacccatcctaaaattctgtttctagatttttaatgtcaagttcccaagttccccctgctggttctaatattaacagaactgcagtcttctgctagccaatagcatttacctgatggcagctagttatgcaagcttcaggagaatttgaacaataacaagaatagggtaagctgggatagaaaggccacctcttcactctctatagaatatagtaacctttatgaaacggggccatatagtttggttatgacatcaatattttacctaggtgaaattgtttaggcttatgtaccttcgttcaaatatcctcatgtaattgccatctgtcactcactatattcacaaaaataaaactctacaactcattctaacattgcttacttaaaagctacatagccctatcgaaatgcgaggattaatgctttaatgcttttagagacagggtctcactgtgttgcccaggctggtctcaaactccaccaaatgtacttcttattcattttatggaaaagactaggctttgcttagtatcatgtccatgtttccttcacctcagtggagcttctgagttttatactgctcaagatcgtcataaataaaattttttctcattgtca

SEQ ID NO: 260 - DNA, 1901 bp, Homo sapiens
agtgtttgggtttcttcgcggctgctcaagatgaaccgactcttcgggaaagcgaaacccaaggctccgccgcccagcctgactgactgcattggcacggtggacagtagagcagaatccattgacaagaagatttctcgattggatgctgagctagtgaagtataaggatcagatcaagaagatgagagagggtcctgcaaagaatatggtcaagcagaaagccttgcgagttttaaagcaaaagaggatgtatgagcagcagcgggacaatcttgcccaacagtcattcaacatggaacaagccaattataccatccagtctttgaaggacaccaagaccacggttgatgctatgaaactgggagtaaaggaaatgaagaaggcatacaagcaagtgaagatcgaccagattgaggatttacaagaccagctagaggatatgatggaagatgcaaatgaaatccaagaagcactgagtcgcagttatggcaccccagaactggatgaagatgatttagaagcagagttggatgcactaggtgatgagcttctggctgatgaagacagttcttatttggatgaggcagcatctgcacctgcaattccagaaggtgttcccactgatacaaaaaacaaggatggagttctggtggatgaatttggattgccacagatccctgcttcatagatttgcatcattcaagcatatcttgtaaaacaaacacatattatgggactaggaaatatttatctttccaaatttgccataacagatttaggtttctttcctttctttgaaggaaagtttaattacattgctcttttattttttccattaagagactcattgcttgggaaatgctttcttcgtactaaaatttgattcctttttttcttatgaaaaacgaactcagtttaaaagtatttttagctcgtatgacttgttttcattcattaataataatttgaaataaaactaaggaaatggaatcttaaaagtctatgacagtgtaactctacagtctcaaaatgacctgataaattgataagacaaagatgagattattggggctgttcatattatgattcagaatcattttctattgtggtattataggttggttaaagtgatggcctttttgatgggttttgttgtgtcttgtgaacaagtcgttactgtgtccattattggaatggaattatcactactgtatcatgagtgggtattttgattctatggttccctcagtattacatcttgacttgtaatcaattatgaatatttcttgatatttaatgtataggacatttatttatactcaataaatatttttcaaaaggatataattttaataatatcacttcagcttaaaacctctactgcggaaaccaaatttaatagaattttaatgtcatttcagcctataactccactacagaaaccaaattaaccagtagcattgtgaggaaagagcaaggaacaatctgggcttgggccctgggtctaccatttactaactactgagtagtctattcaacctctctaaccttctgtttccttattagtaaaatcatgcttaactcacagagcttttgtgaggaataattgaggtaatggtcataagtaccttgttaactgcaaggggctattcttatatgagggattgttaacaataaaaaagaaactgcttcattcttttcttggaaggtgcctggagtactacagcaagttcaaactcctgcccaatttcagggtctttaatgatcctgtcctcccttcctcattcaacttgttgccaacagcatggcccctccagcctagctgggtgcctcacagtgctatgtgcacctgactctcatgtgtctgcagatcaaaccaataaacatttaggaacacca

SEQ ID NO: 261 - DNA, 925 bp, Homo sapiens
acacacacatctgcacctcaaccacagactacacttgctgaactggctcctggggccatgaggctgtcactgccactgctgctgctgctgctgggagcctgggccatcccagggggcctcggggacagggcgccactcacagccacagccccacaactggatgatgaggagatgtactcagcccacatgcccgctcacctgcgctgtgatgcctgcagagctgtggcttaccagatgtggcaaaatctggcaaaggcagagaccaaacttcatacctcaaactctggggggcggcgggagctgagcgagttggtctacacggatgtcctggaccggagctgctcccggaactggcaggactacggagttcgagaagtggaccaagtgaaacgtctcacaggcccaggacttagcgaggggccagagccaagcatcagcgtgatggtcacagggggcccctggcctaccaggctctccaggacatgtttgcactacttgggggagtttggagaagaccagatctatgaagcccaccaacaaggccgaggggctctggaggcattgctatgtgggggaccccagggggcctgctcagagaaggtgtcagccacaagagaagagctctagtcctggactctaccctcctctgaaagaagctggggcttgctctgacggtctccactcccgtctgcaggcagccaggagggcaggaagcccttgctctgtgctgccatcctgcctccctcctccagcctcagggcactcgggcctgggtgggagtcaacgccttcccctctggactcaaataaaacccagtgacctcacttcttttctctgcaaaaggtgcttgtggggctgggagtgcagacattggtgtttctgctgatgtcccttgtgaaaaaaaaaaaaaaactctcaaaatcaa

SEQ ID NO: 262 - DNA, 2187 bp, Homo sapiens
ctcctcctcctcctgctcccccggacagaggttccgggaaccagccgggccggggcggggcggggcgagggagaggggcggccgcgcggatcactgaggctgtggcggcactgcgcccggcgctcgcgtccgtccgcccgtccgcccgcccagccatgactgcgccggtccccgcgccgcggatcctgttgccgttgctgttgctgctgctgctaacgccgcctccgggtgcacgtggtgaggtgtgtatggcttcccgtggactcagcctcttccccgagtcctgtccagatttctgctgtggtacctgtgatgaccaatactgctgctctgacgtgctgaagaaatttgtgtggagcgaggaaaggtgtgctgtgcctgaggccagcgtgcctgccagtgtagagccggtggagcagctgggctcggcgctgaggtttcgccctggctacaacgaccccatgtcagggttcggagcgaccttggccgttggcctgaccatctttgtgctgtctgtcgtcactatcatcatctgcttcacctgctcctgctgctgcctttacaagacgtgccgccgaccacgtccggttgtcaccaccaccacatccaccactgtggtgcatgccccttatcctcagcctccaagtgtgccgcccagctaccctggaccaagctaccagggctaccacaccatgccgcctcagccagggatgccagcagcaccctacccaatgcagtacccaccaccttacccagcccagcccatgggcccaccggcctaccacgagaccctggctggaggagcagccgcgccctaccccgccagccagcctccttacaacccggcctacatggatgccccgaaggcggccctctgagcattccctggcctctctggctgccacttggttatgttgtgtgtgtgcgtgagtggtgtgcaggcgcggttccttacgccccatgtgtgctgtgtgtgtccaggcacggttccttacgccccatgtgtgctgtgtgtgtcctgcctgtatatgtggcttcctctgatgctgacaaggtggggaacaatccttgccagagtgggctgggaccagactttgttctcttcctcacctgaaattatgcttcctaaaatctcaagccaaactcaaagaatggggtggtggggggcaccctgtgaggtggcccctgagaggtgggggcctctccagggcacatctggagttcttctccagcttaccctagggtgaccaagtagggcctgtcacaccagggtggcgcagctttctgtgtgatgcagatgtgtcctggtttcggcagcgtagccagctgctgcttgaggccatggctcgtccccggagttgggggtacccgttgcagagccagggacatgatgcaggcgaagcttgggatctggccaagttggactttgatcctttgggcagatgtcccattgctccctggagcctgtcatgcctgttggggatcaggcagcctcctgatgccagaacacctcaggcagagccctactcagctgtacctgtctgcctggactgtcccctgtccccgcatctcccctgggaccagctggagggccacatgcacacacagcctagctgcccccagggagctctgctgcccttgctggccctgcccttcccacaggtgagcagggctcctgtccaccagcacactcagttctcttccctgcagtgttttcattttattttagccaaacattttgcctgttttctgtttcaaacatgatagttgatatgagactgaaacccctgggttgtggagggaaattggctcagagatggacaacctggcaactgtgagtccctgcttcccgacaccagcctcatggaatatgcaacaactcctgtaccccagtccacggtgttctggcagcagggacacctgggccaatgggccatctggaccaaaggtggggtgtggggccctggatggcagctctggcccagacatgaatacctcgtgttcctcctccctctattactgtttcaccagagctgtcttagctcaaatctgttgtgtttctgagtctagggtctgtacacttgtttataataaatgcaatcgtttggagctgctgccccctttcttcctggcctcggctgctggaattggaatcaggctgtactctttccatccatttgggcttct

SEQ ID NO: 263 - DNA, 1565 bp, Homo sapiens
cttttgctggtgtagctcgtccggttaccttcaggaagattggataaccaagaaatgactaatcaagagtctgccgtacatgtgaaaatgatgccagaattccagaaaagttcagttcgaatcaagaaccctacaagagtagaagaaattatctgtggtcttatcaaaggaggagctgccaaacttcagataataacggactttgatatgacactcagtagattttcatataaagggaaaagatgcccaacatgtcataatatcattgacaactgtaagctggttacagatgaatgtagaaaaaagttattgcaactaaaggaaaaatattacgctattgaagttgatcctgttcttactgtagaagagaagtacccttatatggtggaatggtatactaaatcacatggtttgcttgttcagcaagctttaccaaaagctaaacttaaagaaattgtggcagaatctgacgttatgctcaaagaaggatatgagaatttctttgataagctccaacaacatagcatccccgtgttcatattttcggctggaatcggcgatgtactagaggaagttattcgtcaagctggtgtttatcatcccaatgtcaaagttgtgtccaattttatggattttgatgaaactggggtgctcaaaggatttaaaggagaactaattcatgtatttaacaaacatgatggtgccttgaggaatacagaatatttcaatcaactaaaagacaatagtaacataattcttctgggagactcccaaggagacttaagaatggcagatggagtggccaatgttgagcacattctgaaaattggatatctaaatgatagagtggatgagcttttagaaaagtacatggactcttatgatattgttttagtacaagatgaatcattagaagtagccaactctattttacagaagattctataaacaagcattctccaagaagacctctctcctgtgggtgcaattgaactgttcatccgttcatcttgctgagagacttatttataatatatccttactctcgaagtgttccctttgtataactgaagtattttcagatatggtgaatgcattgactggaagctccttttctccacctctctcaacacactcctcaccgtatcttttaacccatttaaaaaaaaaaaaaagctaaaattagaaaaataactccctacttttccaaagtgaattttgtagtttaatgttatcatgcagcttttgaggagtcttttacactgggaaagtttgtagaaattttaaaataagttttatgaaatggtgaaataatatgcatgattttaagtattgccatttttgtaatttgggttattatgctgatggtatcaccatctcttgaaattgtgttaggtttggttattttgtctggggaaaaaatatttactggaaaagactagcagttagtgttggaaaaacctggtggtgtttacaatgttgctaatcattacaaaacattctatattgaagcactgataataaatatgaaatgcaaaacctttttaattctatggtcaaaacta

SEQ ID NO: 264 - DNA, 1374 bp, Homo sapiens
atttgtggtgagattctctcccaggccacaagacatttcctgctcggaaccttgtttactaatttccactgcttttaaggccctgcactgaaaatgcaagctcaggcgccggtggtcgttgtgacccaacctggagtcggtcccggtccggccccccagaactccaactggcagacaggcatgtgtgactgtttcagcgactgcggagtctgtctctgtggcacattttgtttcccgtgccttgggtgtcaagttgcagctgatatgaatgaatgctgtctgtgtggaacaagcgtcgcaatgaggactctctacaggacccgatatggcatccctggatctatttgtgatgactatatggcaactctttgctgtcctcattgtactctttgccaaatcaagagagatatcaacagaaggagagccatgcgtactttctaaaaactgatggtgaaaagctcttaccgaagcaacaaaattcagcagacacctcttcagcttgagttcttcaccatcttttgcaactgaaatatgatggatatgcttaagtacaactgatggcatgaaaaaaatcaaatttttgatttattataaatgaatgttgtccctgaacttagctaaatggtgcaacttagtttctccttgctttcatattatcgaattcgaatttcctggcttataaactttttaaattacatttgaaatataaaccaaatgaaatattttactgataagattcttcatgcttctttgctctccttaaaatgtctttttcactagttagttccaagggtcagtctcataattttgttcttatactttgatttcctttttctttttttttttttttaatagagttgggggatctttctttctttttttttttttttttttgagatagagtctcgctctgttgcccaggctggagtgcagtggcgtgatctcagctcactgcaacctccacctcctggatacaagcgattctgctgcctcagtctcccgagtagctgggattacaggttcccgccaccatgcccagctaatttttgtatttttagtagagacggggtttcaccatcttggtcaggctggtctcgaactcctgacctcgtgatccacctgcctcggcatcacaaaatgctgggattacaggcatgagccaccgcgtccagcctagagttgggggtctttctatgttgcccaggctggtcttgaactccgggcctctagcaagcctctcatctcagcctcccaaggtgctggaattacaggtgtgagccactgcaccatactttggtttcttagcaggagattttggttcacagtaacccagctctctttcatctaagaactttagatgagaaaaaaaaaaaa

SEQ ID NO: 265 - DNA, 1858 bp, Homo sapiens
agtcccgacgtggaactcagcagcggaggctggacgcttgcatggcgcttgagagattccatcgtgcctggctcacataagcgcttcctggaagtgaagtcgtgctgtcctgaacgcgggccaggcagctgcggcctgggggttttggagtgatcacgaatgagcaaggcgtttgggctcctgaggcaaatctgtcagtccatcctggctgagtcctcgcagtccccggcagatcttgaagaaaagaaggaagaagacagcaacatgaagagagagcagcccagagagcgtcccagggcctgggactaccctcatggcctggttggtttacacaacattggacagacctgctgccttaactccttgattcaggtgttcgtaatgaatgtggacttcaccaggatattgaagaggatcacggtgcccaggggagctgacgagcagaggagaagcgtccctttccagatgcttctgctgctggagaagatgcaggacagccggcagaaagcagtgcggcccctggagctggcctactgcctgcagaagtgcaacgtgcccttgtttgtccaacatgatgctgcccaactgtacctcaaactctggaacctgattaaggaccagatcactgatgtgcacttggtggagagactgcaggccctgtatacgatccgggtgaaggactccttgatttgcgttgactgtgccatggagagtagcagaaacagcagcatgctcaccctcccactttctctttttgatgtggactcaaagcccctgaagacactggaggacgccctgcactgcttcttccagcccagggagttatcaagcaaaagcaagtgcttctgtgagaactgtgggaagaagacccgtgggaaacaggtcttgaagctgacccatttgccccagaccctgacaatccacctcatgcgattctccatcaggaattcacagacgagaaagatctgccactccctgtacttcccccagagcttggatttcagccagatccttccaatgaagcgagagtcttgtgatgctgaggagcagtctggagggcagtatgagctttttgctgtgattgcgcacgtgggaatggcagactccggtcattactgtgtctacatccggaatgctgtggatggaaaatggttctgcttcaatgactccaatatttgcttggtgtcctgggaagacatccagtgtacctacggaaatcctaactaccactggcaggaaactgcatatcttctggtttacatgaagatggagtgctaatggaaatgcccaaaaccttcagagattgacacgctgtcattttccatttccgttcctggatctacggagtcttctaagagattttgcaatgaggagaagcattgttttcaaactatataactgagccttatttataattagggatattatcaaaatatgtaaccatgaggcccctcaggtcctgatcagtcagaatggatgctttcaccagcagacccggccatgtggctgctcggtcctgggtgctcgctgctgtgcaagacattagccctttagttatgagcctgtgggaacttcaggggttcccagtggggagagcagtggcagtgggaggcatctgggggccaaaggtcagtggcagggggtatttcagtattatacaactgctgtgaccagacttgtatactggctgaatatcagtgctgtttgtaatttttcactttgagaaccaacattaattccatatgaatcaagtgttttgtaactgctattcatttattcagcaaatatttattgatcatctcttctccataagatagtgtgataaacacagtcatgaataaagttattttccacaaaa

SEQ ID NO: 266 - DNA, 6015 bp, Homo sapiens
gccgagtcctaggccaggtctggggtaacctggaacttccacctgggctctgcgctaggtctctgtttcactccctccccgcggggcgcgcagctcgcgggtctttggacaccaccggtcctgagtccgcggactgccattttcattaagaactgccacttagaggtaccaaaataaagggtatttgctacctttaatacttgccagttcaggttggaggcacaggcagcagcaagaatggaaagaaatgttcttacaacattttcacaggaaatgtcccagttaattttgaatgaaatgccaaaagctgaatattccagtttattcaatgattttgttgaatctgaattttttttgattgatggggattcattacttatcacatgtatctgtgagatatcatttaagcctgggcagaacctccatttcttctatctggttgaacgctatcttgtggatcttattagcaaaggaggacaattcaccatagttttcttcaaggatgccgagtatgcgtatttcaacttccctgaacttctttctttgagaactgctttaattcttcatcttcagaagaataccaccattgatgttcgaacaacattttcgagatgcttatcaaaagagtggggaagtttcttggaagagagttacccatatttcctgatagttgcagacgaaggcctgaacgatctacaaacacagcttttcaactttttaatcattcattcttgggcaaggaaggtcaacgttgtactttcctcagggcaagaatctgatgttctttgcctttatgcataccttcttccaagcatgtacagacaccagattttttcctggaagaataagcagaacattaaagatgcttatacaaccctgcttaaccagttggaaagatttaagctttcagcattagcacctctttttggaagtttaaaatggaataatattacggaagaggcacacaagactgtatctctgcttacacaagtctggccagaaggatctgacattcggcgtgtcttttgtgttacttcatgctcattatctttgagaatgtaccatcgctttttaggaaacagagagccctcctctggtcaggaaactgagatccaacaggtgaacagtaattgcttaaccctgcaggagatggaagatttgtgtaaactgcattgtctcactgtggtttttctactccatctgcctctttctcaaagagcttgtgctagagtcatcacttcccattgggctgaggacatgaagcctttattacaaatgaaaaagtggtgtgaatatttcatcttaagaaatatacatacttttgaattttggaatctgaatttaattcacctttctgacttaaatgatgagcttttgttgaagaatattgctttttactatgaaaatgaaaatgtaaaaggcctacatttgaatttgggagataccattatgaaagattatgaatatctctggaataccgtatcaaagttggtcagagactttgaggttggacagccatttcctctgagaacaacaaaagtttgttttcttgaaaagaaaccatcaccaatcaaagacagctccaatgaaatggtgcccaatttgggttttattccaacgtcatcttttgtggttgataaatttgctggagatattttgaaagatttgccttttctaaagagtgatgatcctattgttacttcactggttaaacaaaaggaatttgatgaacttgtgcactggcattctcataaacccctgagtgatgattatgacaggtccaggtgtcagtttgatgaaaaatctagagaccctcgtgttcttagatctgtgcaaaagtatcatgttttccaacggttttatgggaattcattagaaacagtctcttcgaaaatcatcgtgactcaaactattaagtcaaagaaggattttagtgggcccaagagcaaaaaggcacacgagaccaaggctgaaataattgctagagagaataagaaaaggttatttgccagggaagaacaaaaggaagagcaaaagtggaatgctttgtcattttctattgaagagcaattgaaagaaaatttacactctggaataaagagcctggaagattttttgaaatcctgtaaaagtagctgtgtgaaacttcaggttgaaatggtggggttaactgcttgcttgaaagcctggaaagaacattgccgaagtgaagaaggtaaaaccacgaaagatttaagtatagctgttcaggtgatgaaaaggatccactccttgatggaaaaatactcagaacttttacaagaagatgatcggcaactcatagccagatgccttaagtatttaggatttgatgagttggcaagttctttacatccagcccaggatgcagaaaatgatgtaaaagtgaagaaaaggaataaatattcagttggcattgggccagctcggttccaactgcaatacatgggccattatttgatacgagatgagagaaaagacccagatcccagggtccaggattttattcccgacacatggcagcgagagctccttgatgttgtggataagaatgagtcagcagtgattgttgccccaacgtcctcaggcaaaacctatgcctcctactactgtatggagaaagtgctgaaggagagcgacgacggggtggtcgtgtacgttgcacccacaaaggcccttgttaatcaagtggcagcaactgttcagaatcgttttacgaaaaatctgccaagtggtgaagttctctgtggtgttttcaccagggagtatcgtcatgatgccttaaactgtcaggtacttattacagtgcctgcctgctttgaaattctgctgcttgctcctcatcgccaaaactgggtgaaaaagatcagatatgttatatttgatgaggttcattgtcttggtggagaaattggagcagaaatctgggaacatctccttgtcatgatccgatgtccctttttggctctttcagctaccataagtaatcctgaacatctcaccgagtggctacaatcggtaaaatggtactggaaacaagaagacaaaataattgaaaataataccgcttctaaaagacatgtgggtcgtcaggccggctttcccaaagactacttgcaagtaaaacaatcgtataaagttagacttgtgctctatggagagaggtataatgatctagagaagcatgtatgttcaataaaacatggtgacattcattttgatcattttcacccatgtgctgcactaacaacagatcatattgaaaggtatggattccctcctgatcttaccctttcacctcgagaaagcatccagctgtatgatgccatgtttcaaatttggaaaagttggcctcgggcccaggaactgtgcccagaaaacttcattcattttaacaataaattagtcattaaaaagatggatgctaggaaatatgaagagagtctaaaggcagaattaacaagttggattaaaaatggcaacgtagagcaggccagaatggtacttcagaatcttagtcctgaagcagatttgagtccagaaaacatgatcaccatgtttccacttctagttgaaaaactaaggaaaatggagaagttacctgcactattttttttattcaagttaggagctgtagaaaacgcagctgaaagtgtgagcactttcctaaagaaaaagcaggagacaaaaaggcctcccaaagctgataaagaagcccatgtcatggctaacaaacttcgaaaagttaaaaaatccatagagaaacaaaagatcatagatgaaaagagccagaaaaaaaccagaaatgtggatcaaagcctaatacatgaagctgaacatgataatctagtgaagtgtctagagaagaacctggaaatcccacaggactgcacatatgctgatcaaaaagcagtggacactgagactttgcagaaggtatttggtcgagtaaaatttgaaagaaaaggtgaagaattgaaagccttggcagaaaggggtattggatatcatcacagtgctatgagtttcaaagaaaaacaattagttgaaatcctctttagaaaaggatatcttagggtggtgacagctactggaacacttgctttaggtgtcaacatgccttgtaaatctgtggtttttgctcaaaactcagtctatctggatgcgttgaattatagacagatgtctggccgtgctggaagaagaggtcaagacctgatgggagatgtatatttctttgatattccattccccaaaataggaaaactcataaaatccaatgttcctgagctgagaggacacttccctctcagcataaccctggtcctgcgactcatgctgctggcttccaagggagatgacccagaggatgccaaggcaaaggtgctatcagtgctaaagcattcattgctgtccttcaagcaacccagagtcatggacatgttaaaactttacttcctgttttctttgcagttcctggtgaaagagggctatttagatcaagaaggtaatcctatggggtttgctggacttgtatcacatttgcattatcatgaaccttctaatcttgtttttgtcagttttcttgtaaatggactcttccatgatctctgtcagccaaccaggaaaggctcaaaacatttttctcaagacgttatggaaaagctagtattagtattggcacatctctttggaagaagatattttccaccaaagttccaagatgcacacttcgagttttatcaatcaaaggtgttccttgatgatctccctgaggattttagtgatgctttagatgaatataacatgaaaattatggaggactttaccactttcctacgaattgtttccaaactggctgatatgaatcaggaatatcaactcccattgtcaaaaatcaaattcacaggtaaagaatgtgaagactctcaactcgtatctcatttgatgagctgcaaggaaggaagagtagcaatttcaccatttgtttgtctgtctgggaactttgatgatgatttgcttcgactagaaactccaaaccatgttactctaggcacaatcggtgtcaatcgctctcaggctccagtgctgttgtcacagaaatttgataaccgaggaaggaaaatgtcgcttaatgcctatgcactggatttctacaaacatggttccttgataggattagtccaggataacaggatgaatgaaggagatgcttattatttgttgaaggattttgcactcaccattaaatctatcagtgtttccttgcgtgagctatgtgaaaatgaagacgacaacgttgtcttagcctttgaacaactgagtacaactttttgggaaaagttaaacaaagtctaaaaacaaagtctatgcaaaccacttaaaaataattccatagtagtttttcaggtcacgtttttgattcttatgcttcttgccagaaatacattatgataaagtggaaatacattacgatgaagtggaaagagcaaacactttggaatcaaacagagttgcaatcaaacctgccatgttctgtcatgaatactcacaaattatttagtatacctgaatcttggtttctttttataactgagtaataatggttacatctcaggtagtttgaggattgactaaaaaaatgcgagaatgttgtatgtgactgaataacaatttttactctgcgaagccaaagtaaatataatattatcagtaactttatccccagtgtcagtatttataaaatgtttattaaggctagaaaaaatgaatacaatatcctgaaggtgaaatatattctcttcaattagcataaatatgatttacataagttagctatacagctattgagatagtactttctagtaaacttaaactactttttaaacatacattttgtgatgatttaacaaaaatatagagaatgatttgctttattgtaattgtatataagtgactggaaaagcacaaagaaataaagtgggttcgatctgttta

SEQ ID NO: 267 - DNA, 5582 bp, Homo sapiens
gcacaactgctaaagctccagagacacgagcgtgtgtggcagcaagagccgccagttcgggaccaccgcagctggggtggcagcggcgcaggaggggtcgcggggagggagtggtgagcgcaggcggcaggggtctgggaaagacgaagtcgctatttgctgtctgagcgcgctcgcagctcctggaagtgttgccgcctctcggtttcgctctcgctcgctgcgctcctagaaggggcggccgcctccaggactgaccagggccaagtggcgctcggcgggcactacatggcggagggtgaagggtacttcgccatgtctgaggacgagctggcctgcagcccctacatccccctaggcggcgacttcggcggcggcgacttcggcggcggcgacttcggcggcggcgacttcggcggtggcggcagcttcggtgggcattgcttggactattgcgaaagccctacggcgcactgcaatgtgctgaactgggagcaagtgcagcggctggacggcatcctgagcgagaccattccgattcacgggcgcggcaacttccccacgctcgagctgcagccgagcctgatcgtgaaggtggtgcggcggcgcctggccgagaagcgcattggcgtccgcgacgtgcgcctcaacggctcggcagccagccatgtcctgcaccaggacagcggcctgggctacaaggacctggacctcatcttctgcgccgacctgcgcggggaaggggagtttcagactgtgaaggacgtcgtgctggactgcctgttggacttcttacccgagggggtgaacaaagagaagatcacaccactcacgctcaaggaagcttatgtgcagaaaatggttaaagtgtgcaatgactctgaccgatggagtcttatatccctgtcaaacaacagtggcaaaaatgtggaactgaaatttgtggattccctccggaggcagtttgaattcagtgtagattcttttcaaatcaaattagactctcttctgctcttttatgaatgttcagagaacccaatgactgagacatttcaccccacaataatcggggagagcgtctatggcgatttccaggaagcctttgatcacctttgtaacaagatcattgccaccaggaacccagaggaaatccgagggggaggcctgcttaagtactgcaacctcttggtgaggggctttaggcccgcctctgatgaaatcaagacccttcaaaggtatatgtgttccaggtttttcatcgacttctcagacattggagagcagcagagaaaactggagtcctatttgcagaaccactttgtgggattggaagaccgcaagtatgagtatctcatgacccttcatggagtggtaaatgagagcacagtgtgcctgatgggacatgaaagaagacagactttaaaccttatcaccatgctggctatccgggtgttagctgaccaaaatgtcattcctaatgtggctaatgtcacttgctattaccagccagccccctatgtagcagatgccaactttagcaattactacattgcacaggttcagccagtattcacgtgccagcaacagacctactccacttggctaccctgcaattaagaatcatttaaaaatgtcctgtggggaagccatttcagacaagacaggagagaaaaaaaaaaaaaagaaaaaaaaaagagtgatccagcccttattagggatgtgttttgtgcaatgatgatatgctcctggttttaagtttggcaaagcttatgtatcttttaatagatgtgggagcatgatctcgaaaggatccttttcccttctcttattctcctacccaattggattctatcctgcaaaaaaagagagacctgtcattagaagcaaccaggttctcctgatacaagagaagaaatgtgtgatgacaatatgggtttgctgtatctgctcccatagctttgccataggaaaaaaaaaagtggaaagtttcttttaagatggaattcataaaagggaaaatacggaggaaaaaaggtctcactccaacttgtgaatcagtttaggagttcagatattaatagtaacaatacaggaaaaaggggaactccaacgttgggattactgtctgaggcttgtagcaagtgctttctgtggaatgatcttgttttgctaacaaacggcttgctccaaatgaacagtagtaggttggtgcagttctcgtaacaatcagcagaacttatgatgacacaatccattaattccagctgcgtgcatagatcacatttttaaaatgtaaaaatgcaagcaaaaacagctgtaacaaagaaagtgtgctcaaggaccaaagatttaacagataaaaatacccaattagaagagatatagtagactatatgaagagagattatatttgttacacaccaatatacatcaaagtgcctgttgccttctgaaaatttgaagtggcaaaattattttatggtttaatgattattttattttatcagggactgcctcaagaagaaaataacataagcttgtgaatggtggagaaaatgccctattttttcttgcaaatacttgtataaagttaacatttgttgatctgatattatcataggtacatgtgtatgtgtgtataaattatatgtgtgtgtgtatatatacattttatatatacattttatatgtatatatacacagtagattgactatgatctagaataatgtctcaaataggaaatgtttaaatactgtgtgtttttatgttttcaacaggataacatgagacgtgggcatattgcaatgatgaattaaatccacatctaaaaaaattaaatgaaggagggaaccaagtaatatatttcataggaagagcagaaattatactgttttagtgggatttttttttctttttttttttttctttggtgagccataaaattccacaaatgggagaatatttgtttggcagagcactcttttttatattgaactgccattttgacagttggaacccatttattaaaaaaaaaattgcattcctctatgatgtttaatctagtggatcatggatcagtaataggctacttaaatccctgactgctaaaaaggatttccggtgatctaaacactacttgctaatgtttaaatgaattttaatgaatgcattctgcatttctggaccactagaatttagtaatgtgaaatgaccctttttacagaatatttgcacaattgcttaaaatttatatatgagatatatattatatataacattttataaatcatgtcaatatgaaacatctttgatctggttgtcacactgcatttaaatatttagtactgtactttaaatcgctttccattaaatcaaatccaactttattttctttcttacaaaaataccagttatacctttgtgaaatgaactggcattactatttcagttcaataacagctaatcctaaaaccaccctttctcctagccagtagttcctctagatactggtctctgaaaatgcatttgttaaaaacaaaacaaaactaacacataagaaccttccctttgtgttgtgaaacaaccacataatctccacaaccttagtggatgactgcttgctatgataattcctcgaagacccaattagaagattttcatcatcagttaaagagagaccacgggagaaaaaaatatcctcctgttggcagtataatttgtttgtttgtttatctagggatcctcagatgcttagtgctaggttaatccaggttaatccgtctggactaccttttgtgcatctttctttgaagccttaatgggaacctgatgggtttgctgtagcagcttccttgtgaattctgtcagagctgcaacagccgctgcactgccactcagttttctaaggaactcctcctactaccatcttggctcagtctccctcacttaagccctgggtttgaaaaattaattgcaacttcccaggaaacattgttcagtttgcagattaagcctggcactcacctatcagaaaccagagctccgcctgcttagttgtttcaaagttttctgaaagaaaactaggggagcacttgtgaacacaggagcagctggtgatctgctttcttaccctaactcttgacaaatgagtcgtctactattttaaagagtctggaggtctctgactctgccataacaataacctgctgttaatttataacacagatttttgtttggaagagccttatttgaaatacactttgatttattttcttaaatatttatattcttttcttgcttacttcagggttggtagcttagttggaagtgccagcacctggcacctattcatatagaacaggctgtactcaagacaacttctagcatttactttaagacttatataatttatttctattttgtgtgtactatagtcttgtgcatatgtagttgaacacacagtgaaatatatgtctctctttgtggatgtgcggcctaaaaatttgaatgtctggtgagagagagccatgtgtataggtcagagaaaagaacagctcccgactccctattagcgcctgtgatttgtttccttttgtgtttatctggcctagtgtgctgtttctttaaaccaggaagaagttttgtcttttggaggctcttctcacctgtccagcctggcatgtcagagaacacatagcctgtgacaatgccgtttttaaaggtttacttaatttgcagtaaatccagctgcctcaagaactcctacaccaagatggacatttcctttccagaaatgggatcaagtatctgctcactttggtattggatggactaataatgtagctccaaaaatgcaaggatggaagaatatgtgtaatccaaaccaaggaaggaaatgaaaagtgaacgtactgtttttaccacccctttctgtttgcttattgttggttgcttcactgtgcataaagttgttttcaatgcaacgcttgttaaataaatattgtgaactattttgtaaatgaaatgtattatgttgaaagctgtcagttcaaaaataagcttttttgttgttgttgaagatgaagtgtgttaggtgaaaccaaaaagccaaaaaaagtaatttcatatatagcatctatttgaatataatctttctttaaaatttcttttagcatagcattttcagtgctaagaaagaatctctatgttatattttgttaaaataatggctttctaacaaagcaaatggtaaagtacaaagttggaagatgtcaagttaacgagacttgctgcaaagccttgcagaacggaggaggctctgcctgctggctgtctctccctccaacctctctacaatcatgcctgctttgaggtgttctgttgcagcaagctgcaccttgggtcactcttttggaatattttgactataggctgcgtcacaggcagaaaaggagttgatggaaaatggactaaaaaactgacatgtttgaatcagtgctagagggaacagattgtgaattttgtttacagcatccaatatttggatttttttgtaaataaaaaagttatttttttctattga

SEQ ID NO: 268 - DNA, 6808 bp, Homo sapiens
agacggagcctgggctcccagcggcaaggtgaggcagagctgcgctcctcgctgaacgcgggccgagctcggcggctgcgggggagacgcgcaggagcccagaccgcgaccgagagcgggagctaggcgggcggcggcggcggagggggagcccgcgagccgccgggcggagagcccaagccgcgctgtcgccgcgcagggacgacttggccaacactcacacacactcacacacacccagcccgagcgggcgctcgcggcgaaccgtcaacatggcgctggggctcctgcccgagcgcgggcggcggcggcagcgcgggagctgctgagctcggccaagcccagtccagctgcgggagcccggaggatcgcacggggctgtcgccacctgcccggaggccccgagcccgccccgccccgcccccacccggcccagagcccacccctcggcggggccgaccccgagggcagccggctgccagcagacggcgagggagtcgagtgagcgcggcgccgcgagcgggctgcgggcagccggggaccgcaaactttgctgctcgccgcgcttctccggcccggctccttctccgctcgttaacgtcgccaaccccccccacccctcatatctctctccacccacccaaccgccccccgctccttctcgccgcctcgagtccgcttgggggaaaacttcaaagagccggatcgcaggctccctgcctactcccccaccggggatttcagactagacgcttgaagcaaagctgccatcccagaagacgacatgctctcagcaacccccctgtatgggaacgttcacagctggatgaacagcgagagggtccgcatgtgtggggcgagcgaagacaggaaaatccttgtaaatgatggtgacgcttcaaaagccagactggaactgagggaagagaatcccttgaaccacaacgtggtggatgcgagcacggcccataggatcgatggcctggcagcactgagcatggaccgcactggcctgatccgggaagggctgcgggtcccgggaaacatcgtctattctagcttgtgtggactgggctcagagaaaggtcgggaggctgccacaagcactctaggtggccttgggttttcttcggaaagaaatccagagatgcagttcaaaccgaatacacccgagacagtggaggcttctgccgtctctggaaaacccccaaatggcttcagtgctatatacaaaacaccgcctggaatacaaaaaagtgctgtagccacagcagaagcgctgggcttggacaggcctgccagcgacaaacagagccctctcaacatcaatggtgctagttatctgcggctgccctgggtcaatccttacatggagggtgccacgccagccatctaccctttcctcgactcgccaaataagtattcactgaacatgtacaaggccttgctacctcagcagtcctacagcttggcccagccgctgtattctccagtctgcaccaatggggagcgctttctctacctgccgccacctcactacgtcggtccccacatcccatcgtccttggcatcacccatgaggctctcgacaccttcggcctccccagccatcccgcctctcgtccattgcgcagacaaaagcctcccgtggaagatgggcgtcagccctgggaatcctgttgattcccacgcctatcctcacatccagaacagtaagcagcccagggttccctctgccaaggcggtcaccagtggcctgccgggggacacagctctcctgttgcccccctcgcctcggccgtcaccccgagtccaccttcccacccagcctgctgcagacacctactcggagttccacaagcactatgccaggatctccacctctccttcagttgccctgtcaaagccatacatgacagttagcagcgagttccccgcggccaggctctccaatggcaagtatcccaaggctccggaagggggcgaaggtgcccagccagtgcccgggcatgcccggaagacagcggttcaagacagaaaagatggcagctcacctcctctgttggagaagcagaccgttaccaaagacgtcacagataagccactagacttgtcttctaaagtggtggatgtagatgcttccaaagctgaccacatgaaaaagatggctcccacggtcctggttcacagcagggctggaagtggcttagtgctctccggaagtgagattccgaaagaaacactatctcctccaggaaatggttgtgctatctatagatctgaaatcatcagcactgctccctcatcctgggtggtgcccgggccaagtcctaacgaagagaacaatggcaaaagcatgtcgctgaaaaacaaggcattggactgggcgataccacagcagcggagttcatcatgcccgcgcatgggcggcaccgatgctgtcatcactaacgtttcagggtcagtgtcgagtgcaggccgcccagcctccgcatcacccgcccccaatgccaatgcagatggcaccaaaaccagcaggagctctgtagaaaccacaccatccgttattcagcacgtgggccagcccccggccactcctgccaagcacagtagcagcaccagcagcaagggcgccaaagccagcaacccagaaccgagtttcaaagcaaacgagaacggccttccaccaagctctatatttctgtctccaaatgaggcattcaggtccccaccaattccctaccccaggagttacctcccttacccagcccctgagggcattgctgtaagtcccctctccttacatggcaaaggacctgtctaccctcacccagttttgttacccaatggcagtctgtttcctgggcaccttgccccaaagcctgggctgccctatgggcttcccaccggccgtccagagtttgtgacctaccaagatgccctggggttgggcatggtgcatcccatgttgataccacacacgcccatagagattactaaagaggagaaaccagagaggagatcccggtcccatgagagagcccgttacgaggacccaaccctccggaatcggttttccgagattttggaaactagcagcaccaagttacatccagatgtccccaccgacaagaacctaaagccgaaccccaactggaatcaagggaagactgttgtcaaaagcgacaagcttgtctacgtagaccttctccgagaagaaccagatgctaaaactgacacaaacgtgtccaaacccagctttgcagcagagagtgttggccagagcgctgagccccccaagccctcagttgagccggccctgcagcagcaccgtgatttcatcgccctgagagaggagttggggcgcatcagtgacttccacgaaacttatactttcaaacagccagtcttcaccgtaagcaaggacagtgttctggcaggtaccaacaaagagaacctagggttgccagtctcgactccattcctggagccacctctggggagcgatggccctgctgtaacttttggtaaaacccaagaggatcccaaaccattttgtgtgggcagtgccccaccaagtgtggatgtgacccccacctataccaaagatggagctgatgaggctgaatcaaatgatggcaaagttctgaaaccgaagccatctaagctggcaaagagaatcgccaactcagcgggttacgtgggtgaccgattcaaatgtgtcactaccgaactgtatgcagattccagtcagctcagccgggagcaacgggcattgcagatggaaggattacaagaggacagtattttatgtctacccgctgcttactgtgagcgtgcaatgatgcgcttctcagagttggagatgaaagaaagagaaggtggccacccagcaaccaaagactccgagatgtgcaaattcagcccagccgactgggaaaggttgaaaggaaatcaggacaaaaagccaaagtcggtcaccctggaggaggccattgcagaacagaacgaaagtgagagatgcgagtatagtgttggaaacaagcaccgtgatccctttgaagccccagaggacaaagatcttcctgtggagaagtactttgtggagaggcagcctgtgagcgagcctcccgcagaccaggtggcctcggacatgcctcacagccccaccctccgggtggacaggaaacgcaaagtctcaggtgacagcagccacactgagaccactgcggaggaggtgccagaggaccctctgctgaaagccaaacgccgacgagtctctaaagggctccatcctaaaaaacaacgccacttgctgcaccttagagaacgatgggagcagcaggtgtcggcagcagatggcaaacctggccggcaaagcaggaaggaagtgacccaggccactcagcctgaggccattcctcaggggactaacatcactgaagagaaacctggcaggaaaagggcagaggccaaaggcaacagaagctggtcggaagagtctcttaaacccagtgacaatgaacaaggcttgcctgtgttctccggctctccgcccatgaagagtctttcatccaccagtgcaggcggcaaaaagcaggctcagccaagctgcgcaccagcctccaggccgcctgccaaacagcagaaaattaaagaaaaccagaagacagatgtgctgtgtgcagacgaagaagaggattgccaggctgcctccctgctgcagaaatacaccgacaacagcgagaagccatccgggaagagactgtgcaaaaccaaacacttgatccctcaggagtccaggcggggattgccactgacaggggaatactacgtggagaatgccgatggcaaggtgactgtccggagattcagaaagcggccggagcccagttcggactatgatctgtcaccagccaagcaggagccaaagcccttcgaccgcttgcagcaactgctaccagcctcccagtccacacagctgccatgctcaagttcccctcaggagaccacccagtctcgccctatgccgccggaagcacggagacttattgtcaataagaacgctggcgagacccttctgcagcgggcagccaggcttggctatgaggaagtggtcctgtactgcttagagaacaagatttgtgatgtaaatcatcgggacaacgcaggttactgcgccctgcatgaagcttgtgctaggggctggctcaacattgtgcgacacctccttgaatatggcgctgatgtcaactgtagtgcccaggatggaaccaggcctctgcacgatgctgttgagaacgatcacttggaaattgtccgactacttctctcttatggtgctgaccccaccttggctacgtactcaggtagaaccatcatgaaaatgacccacagtgaacttatggaaaagttcttaacagattatttaaatgacctccagggtcgcaatgatgatgacgccagtggcacttgggacttctatggcagctctgtttgtgaaccagatgatgaaagtggctatgatgttttagccaaccccccaggaccagaagaccaggatgatgatgacgatgcctatagcgatgtgtttgaatttgaattttcagagacccccctcttaccgtgttataacatccaagtatctgtggctcaggggccacgaaactggctactgctttcggatgtccttaagaaattgaaaatgtcctcccgcatatttcgctgcaattttccaaacgtggaaattgtcaccattgcagaggcagaattttatcggcaggtttctgcaagtctcttgttctcttgctccaaagacctggaagccttcaaccctgaaagtaaggagctgttagatctggtggaattcacgaacgaaattcagactctgctgggctcctctgtagagtggctccaccccagtgatctggcctcagacaactactggtgagcaagctggacccaccatgtacagtgtgttatagtgttaatccttgtgcatatgtgtcataatacaactatttctgtaaagaaaggacactattacatatgaaaatatctcttctttatataagagaaattactccagtcagaaggacttagaaacatgtttttttccttttaaacttttaagtcagtttttatgaagttgttataatgtttctttacttttcaatgcacacatgctttgggatacgtttgtttttacttggaacatttgtttcttttcttttttaaggagaaaaaaaaatgagtaaaaggagctccacactttgacttaatttcatacaaagctctgatgacaggccatgactgtagagtggtcagaactgtgtggttggtttgagggagcgaattcggggaaggcacttggtgatataactttgttttgtttacagagtacctgctcgggccaggtaaatgctattggatgtaatccagtagtgtgtaatataaattcaaaccatatccacacacaacaactaattgtatgaaacttttatatcctaatttaaaagctgtgaaattagttttcacgcatcaaaccggattgtttatatgtttaaacattttatgctcttatttaaagaagactttgagctatttttttctgtaccctgtaaaatattgaaaactaacataatatgttgaggttgcttggaaatgtacataaaactaaaattttctgaatcgtgtgtttatgtttgaaatctgtgttttaactttgtaagtaaattctctgcctttgtatttatattttacaaaaattttcttaaaaggcaataaaactgttgaggaaaggagaaaa

SEQ ID NO: 269 - DNA, 5313 bp, Homo sapiens
agaggctccccagcgtcgccctaggctgggactctagtaggtcttcggctcagttttggctgcagcgcccgcgtagatcgcttcggccgggttctacgcccggctcaactatgagccggtgcgcccaggcggcggaagtggcggccacagtgccaggtgccggcgtcgggaacgtggggctgcggccgcccatggtgccccgtcaggcgtccttcttcccgccgccggtgccgaaccccttcgtgcagcagacgcagatcggctccgcgaggcgggtccagattgtccttcttgggattatcttgcttccaattcgtgtcttattggttgcgttaattttattacttgcatggccatttgctgcaatttcaacagtatgctgtcctgaaaagctgacccacccaataactggttggaggaggaaaattactcaaacagctttgaaatttctgggtcgtgctatgttcttttcaatgggatttatagttgctgtaaaaggaaagattgcaagtcctttggaagcaccagtttttgttgctgcccctcattcaacattctttgatggaattgcctgtgttgtagctgggttaccttctatggtatctcgaaatgagaatgcacaagtccctctgattggcagactgttacgggctgtgcaaccagttttggtgtcccgtgtagatccggattcccgaaaaaacacaataaatgaaataataaagcgaacaacatcaggaggagaatggccccagatactagttttcccagaaggtacttgtactaatcgttcctgtttgattacttttaaaccaggagccttcattccaggagttccagtgcagccagtcctcctcagatacccaaacaagctggatactgtgacctggacatggcaaggatatacattcattcagctttgtatgcttactttctgccagctcttcacaaaggtagaagttgagtttatgccagttcaagtaccaaatgatgaagaaaaaaatgatcctgtcctttttgccaataaagtccggaatttaatggcagaagctctgggaataccagtaacagatcatacctatgaagactgcagattgatgatttcagcaggacagctaacattgcctatggaagctgggctggtggaatttactaaaattagccgaaaattgaaattagattgggatggtgttcgtaagcatttggatgaatatgcatctattgcgagttcctcaaaaggaggaagaattggaattgaagaattcgccaagtatttaaagttgcctgtttcagatgtcttgagacaactttttgcactctttgacaggaaccatgatggcagcattgacttccgagagtatgtgattggcctggctgtcttgtgcaacccttccaacacagaggagatcatccaggtggcatttaagctgtttgacgttgatgaggatggctacataacggaggaagagttctccaccattctacaggcttcccttggagtgcctgaccttgatgtttctggtctcttcaaggaaatagcccaaggggactcaatttcctatgaggaatttaaaagttttgccttaaagcatccagaatatgctaagatatttacaacatacctagacctccagacgtgccatgtgttttcattaccaaaagaagtccagacaaccccctccaccgccagtaataaagtcagccctgaaaagcatgaagagagtacctcagacaaaaaagatgactgaaagcagtatttccaataaggaaaacacagtagcttttgcttgaaattgtaaaggcacttattgataatacttttaatgtgttggtaatgatgtttaaaattgaaagatttttaaaacaaaaatgatagattttcttactaaaaatgtttttattaaccttgcttttattggaaaaaatcaagcaatatttcgttttcttttgtgttatattgtactttactgattcatttactggtgatacatatgtttttatggattttccagtttaatttgcatatacaaatgaatgcaatggtctattggtgagcattgagcaacactgtataaagttttaaaaatgtaaacactttttaatctactttcctctaaaaatcaataatattctattatttctaatccttttccacttgggaaataacaatgaagaatctgagaatttgacatctataactttacagattcatttttccatttaaatttcagtttcttggatcactgaatatgggaagggagagcttcactaattagacgcagcttcttaagaacttatattctctttgacatacatctctattgtagttttttgttttgttttgttttttgagatggagtcttgctctgtcacccaggctggagtgcagtggtgcaatctcagctcactgcaacctctgcctcctgggttcaagtgattctcgtacctcagactcccgagtagttgggattacaggtgcccaccaccacacccgactaatttttgtatttttagtagccatgtggttttgccatgttggccaggctggtttcgaactcctgacctcaggtgatccacccacctcagcctcccaaagtgctgggattacaggtgtgagccaccgttcccggcctattgtagattttcttaactacttgctaaggaaatcatatccttttacatgaactacaggtttagaacttggttttaagacaactgctatggccagaaggtaaatgggaattgccttattgaaggtaacattgattgcctaataagaaaatgaattgtttgccacagagttgaatttaatttgagttagatagttcagaatgtagcacttgccctataaatgaatcagatttgttctatttatataatattagaattaatatattatcatgtaagtgggaattttattttgttaagtggactctcaaattttagaacttgtgtgaaatatctcccagaaaacacaaaaggtttcaaggtatcacccaaagctagggaatcaacaaacgtactttattaatgcaagaccacaatttaagccccaggcaggaatccaacagtaacatttttcctttaggttaagcagtaatttttttgaattgtcatttttaatgggtctcacacatgcatattgctaatatcattcatgtttgaggttttcaacaaagaaccaatttattaatataatgtacaaaaatagttggttcattttctgaattcagtctttgaaataaaactccttgttttggccgtgtttctgaatgtattggtgattcacccccaagctaattttttaaagtcatttttgaagttgggaagtctcatgagagatgttgaagtatgtatttaatcaagagtcatgatttcaaactagttttacatattaagcagttagtgttctaatttaatgggtaaatgtgtgtttggataaatatctgaaaattttatccttaagtatatataattatttgcctcttatatgtcttaaagctatttaaacaaggtgttaaatgagccaaaacaattaagtaattagaacagtacatttttatcagagtgtctgtcatatgcaatgaatgtatgtaatactaaaaaatcatgactacttttatcaaagaaaaaccacacattaatcctattaatcatgaaagcgtagcattgtaaattaaaggttttctttgaggctcttgaaagtgatcccattgctttcctgttttaaaaatattttatgctctttatttccacttctgtgaatgtgatatttctattttgtgattatgttactgaataaacaaacttgctacataaaattcttagcaattaaaaaaattctgattctgccattttgtctcaaatgtaatatacccttttaatatcatatgtttacatatttatgaatgattaatcatttttgtttgcattaaactttatgaaatgtcagaaatgattttactctaatgaaactcaaattttgcccaaagtagcaatattcttaaagatgttgaattttgactggttgaattttatatagtaacacacaagtcgtgatcatcaatattattgcagaccaggactctgcttatatgccttgctaacaaagatttctttcacagaggcttttctcctctcaagacttaaagtaagaattacattttattaagtcagttaaatgcaccatggcttcatatagtaatataaaaaaactctttgaagtgagaaatattatatcctaaaacctctaaaccacaaacattcaattgaaagagttctgttgaaggataatgacatactgactgcttacagaccaagttgcttgcattttgtatgtttagccctcctttgccactgcttttagagccttggaaggctaagtgtgatagtaatgctagctctaatgcatatttaaaggagactgcctcgcttttagaagacatctggtctgctctctgcatgaggcacagcagtaaagctctttgattcccagaatcaagaactctccccttcagactattaccgaatgcaaggtggttaattgaaggccactaattgatgctcaaatagaaggatattgactatattggaacagatggagtctctactacaaaagtctttgggtatttgtttcttacatagaaaatgctaacatgaatagaaagatactggtgcaagaccattcccgggaaagtagacatacttacatttttttccttttctgctcatttgaatgaactcaattttatgttaaattgttatatcagagtgacaaataagtgctatggcttgatagaagtgaagctcttcacatatattcaaaatacatatcacaaactttggtaaataggatagtaatctgaagaacttttgccctttttaccccatttactgtaactcttgtttctaggtaatcgttctctctcaacaaacttctcaagcgtctgtgtaacaagccacatgttctaacaaattgtctccatcgcacttcaacagccaggtccctattttttataacgtattaaccttattattttcttattattttaaaagaatctatgcacattagcaaaatttaaaagatagagaaaaatataaacagaaaaaattatgtttacttctaccaccctaaatcaactattatcaattttatacatattttactccatcttttttcaaagtttcttacattttccaatgtcattaaaattctctgtgaatgtaaattttaaaaactgtacctactgttttttggaaatctgtaacaagctatgtgtaatcattcttctaatattaaacatattgtgtccagaa

SEQ ID NO: 270 - DNA, 4415 bp, Homo sapiens
aaaacggacctcagaaaaccaggactagctctactgtcgggggcagggtgaccccatcagtaacctacaacccctctagaacttcacaactccctctcaccatggagtttgcatttgatgcagaaaggcatgtgatccctccctccttctgacctcttagctggggattccatggccacacaaccctgtgactccatgtccccccgattccaggaccccccatggccccatgattccttgactcctatgaccttatgacccctgaccttccaagtgacttccttggactttgacccctgtgactgtgcttcccattccccgcccccacaacctgtgactctggctccctttgggggtcttgttagtctgggcctccccaggaagatgtgggggaggctctggcccctcctcctcagcatcctcacagcaactgcagtcccaggaccctcactgcggagaccgtctagagaactagatgccacccctcggatgaccataccctatgaagagctctctgggacccggcacttcaagggccaagcccagaactactcaacactgctgctggaggaggcctcagcaaggctgctggtgggagcccgaggtgccctgttctctctcagtgccaacgacataggagatggggctcacaaagagatccactgggaagcctccccagagatgcaaagcaaatgtcatcaaaaagggaaaaacaaccagacggagtgctttaaccatgtgcggttcctgcagcggctcaattctacccacctctatgcatgtgggactcacgccttccagcccctctgtgcagccattgatgctgaggccttcaccttgccaaccagcttcgaggaggggaaggagaagtgtccttatgacccagcccgtggcttcacaggcctcatcattgatggaggcctctacacagccactaggtatgaattccggagcattcctgacatccgccggagccgccacccacactccctgagaactgaggagacaccaatgcattggctcaatgatgcggagtttgtgttctccgtcctcgtgcgggagagcaaggccagtgcagtgggtgatgatgacaaggtgtactacttcttcacggagcgtgccactgaggagggctctggcagcttcactcagagccgcagcagtcaccgtgtggcccgtgtggctcgtgtctgcaagggagacctgggagggaagaagatcctgcagaagaagtggacttccttcctgaaagcccgtctcatctgccacattccactgtatgagacactgcgtggggtctgcagcctggatgctgaaacctcaagccgtacacacttctatgcagccttcacgctgagcacacagtggaagaccctggaggcctcagccatctgccgctatgacctggcagagatccaggctgtctttgcaggaccctatatggaataccaggatggttcccggcgctggggtcgctatgagggtggggtgcctgagccccggcctggctcgtgtatcacagattcattgcgcagccaaggctacaattcatcccaagacttgccatccctggtcctggactttgtaaagttgcacccactgatggctcggcccgttgtgcccacacgtggacggcccctgctgctcaagcgcaacatacgctacacacaccttacagggacacctgtcaccacgcctgctggacctacctatgacctgctctttctgggcacagctgatggctggatccacaaggccgtagtcctgggctctgggatgcacattattgaagagacacaagtgttcagggagtcccagtctgtggaaaatctagtcatctctctattgcagcacagcctctatgtgggggctcctagcggagtcatccagctaccactctccagctgctcccgctaccgatcctgctatgactgcatcttggcccgagacccctactgtggctgggaccctggcacccatgcctgcgcagcagccaccaccatagccaacaggtcccagggaagcaggacagcactgatacaggacatagagagaggaaatcgaggctgtgagagcagcagggatacagggccaccaccaccactgaagacccgctctgtgctccggggtgatgatgtcctcctgccctgtgaccagccatccaacctggcccgggccttgtggctactcaatgggagcatgggcctgagcgatgggcagggtggctaccgtgtgggcgtggacgggctgctggttacagatgcacagcctgagcacagtggcaactatggctgctatgccgaggaaaatggcctccgcaccctgctggcctcctatagtctcacagtccggccagccactcctgccccagctccaaaagcccctgccacacctggggcacagctggcacctgatgtgagactgctctatgtgctagccattgccgcgcttggtggcctctgcctcatcctggcctcctccctcctctatgtggcctgtctgcgggaaggcagacgagggcgccgacggaaatactcactgggtcgggccagccgggcaggaggatctgcggtgcaactgcagacagtctcaggccagtgtcctggagaggaagatgagggtgatgatgagggggctgggggcctggagggcagctgtctccagatcatccctggggagggagccccagccccaccacccccaccgcccccaccgccaccggctgagctgaccaatggcttggtggcactgcccagccggctgcggaggatgaatggcaatagctatgtgcttctgaggcagagcaacaatggagtaccagcagggccctgctccttcgccgaggaactcagccgcatcctggaaaaaaggaagcacacgcagctcgtggagcagctagatgagagctctgtctgagcccagcctcccagaacaaatgctcttccaagccagcctatctgtcccaggctgggccactgcctccctaacacagccaccctcccttcattacccccactccatacccttctcccaactttttgatgtccctgtagggctggccagtcaggcccagccaaagccccctcctcagtctccacagacccacatgtgagcagcccaggcccatcggtgctcctcagaggtaggtgctccctcaggatcaggtgccctgcagacccagagccagttcctatcccctaacctaaacacttataggtgaggactccatcctcctgttccattcatctgcccaaaccctttctctttctcccaggcagggctctgcaggtccatatgggctcaatgtcaccaccctctgcatggccctgtgtgctggatggtcctgaaaccagacaagacctctgccagccacctaagccctgcgtacattcacatgcacacatggaagaatgtttatcggctgggctgcagtgcccccaccctcaccttctcctggtgcattcttgtttcatccctgcttctggacttggggtaccctcccaattgccacatcctatctggtcctcttccccagccccatgtggtgacctctttgtcaagagcttgggaacgggccagcctggggaggtaagactgcatcactcccctcctctcccttcctgtgtggcccttgtgaatcagcctccccactctccttggtcattctcaagagtatgagagacagagctccaggcatgtcccatccccatgcacatgtggtaacacacacctgtatcacacatgtgcttacatttccactcacatgcacctctgagcctcccttgctgtcttggacctgtctgttgggtttagtccgtggacatttcagagggagatccccctcccatttaactgtcctcacaggcccttgcctaggatggatgaccaacactgcactcaatgagccagcctctcttttgggggaatcaagcatttgcttcctctagactacagcagggaaagggaggagaaatctgatgtctcaactggcacatgaagcccattcttggaactatgcaaagggcagaggctgggagtttggacgcttagctcctacccctgtcctacctcaccggggcactttcaggggccaggggcctctgaagtctctaggcctatatgggacaatcaattctgactgagctcccccattcccctcgggtgaggatgactgttatttttgtagctgagaacgtggaatcccacgggtttttactgcccttcacccaacctctcccacctccaccccacaatgaatgtatttattgtgagaatggctacacttctttaggaatgcccccacttacaaccaggtgggtggaacaggcatgtgacagagtggggagcctgggctcagctcctccccctgccgttggttaataaacaccctttttccccacaaaaaaaaaaaaaaa

SEQ ID NO: 271 - DNA, 3776 bp, Homo sapiens
accagcgttcgggagcctgtcgcagcgggaccgacggaatccggagcaggcgacagggcgcagaagcgggatgtacttctgttggggcgccgactccagggagctgcagcgccggaggacggcgggcagccccggggctgagctactgcaggcggccagcggggagcgccactctctgctgctgctgaccaaccacagggtcctctcgtgcggagacaacagcaggggtcagctgggccgcaggggcgcgcagcgcggggagctgccagaaccaattcaggcattggaaaccctaattgttgatctcgtgagctgcgggaaggagcactccctggctgtgtgccacaaaggaagggtcttcgcatggggagctggttctgaagggcagctggggattggagaattcaaggaaataagtttcacacctaagaaaataatgactctgaatgatataaaaataatacaagtttcctgtggacactaccactccctggcattatcaaaagatagccaagtgttttcgtggggaaagaacagccatgggcagctgggcttggggaaggagttcccctcccaagccagcccgcagagggtgaggtccctggaggggatcccactggctcaggtggctgccggaggggctcacagctttgccctgtctctctgtgggacttcgtttggctggggaagtaacagtgccgggcagctggccctcagtgggcgtaatgtcccagtgcaaagcaacaagcctctctcagtcggtgcactgaagaatctaggtgtggtttatatcagctgtggtgatgcacacactgcggtgcttacccaggacgggaaagtgttcacatttggagacaatcgctctggacagctgggatacagccccactcctgagaagagaggtccacaacttgtggaaagaattgatggcctagtttcgcagatagattgtggaagttatcacaccctggcatatgtgcacaccactggtcaggtggtatcttttggtcatggaccaagtgacacaagcaagccaactcatccggaggccctgacagagaactttgacattagctgcctgatttctgctgaagacttcgtggatgttcaagtcaaacacatttttgctggaacatatgccaactttgtgacaactcatcaggatactagttccacacgtgctcccgggaaaaccctgccagaaataagccgaattagccagtccatggcagaaaaatggatagcagtgaaaagaagaagtactgaacatgaaatggctaaaagtgaaattagaatgatattttcatctcctgcttgtctgactgcaagttttttaaagaaaagaggaactggagaaacgacttccattgatgtggacttagaaatggcaagagataccttcaagaagttaacaaaaaaggaatggatttcttccatgataactacgtgtctcgaggatgatctgctcagagctcttccatgccattctccacaccaagaagctttatcagttttcctcctgctcccagaatgtcctgtgatgcatgattctaagaactggaagaacctggtggttccatttgcaaaggctgtgtgtgaaatgagtaaacaatctttgcaagtcctaaagaagtgttgggcatttttgcaagaatcttctctgaatccgctgatccagatgcttaaagcagccatcatctctcagctgcttcatcagactaaaaccgaacaggatcactgtaatgttaaagctcttttaggaatgatgaaagaactgcataaggtaaacaaagctaactgtcgactaccagaaaatactttcaacataaatgaactctccaacttattaaacttttatatagatagaggaagacagctctttcgggataaccacctgatacctgcagaaacccccagtcctgttattttcagtgattttccatttatctttaattcgctatccaaaattaaattattgcaagctgattcacatataaagatgcagatgtcagaaaagaaagcatacatgcttatgcatgaaacaattctgcaaaaaaaggatgaatttcctccatcacccagatttatacttagagtcagacgaagtcgcctggttaaagatgctctgcgtcaattaagtcaagctgaagctactgacttctgcaaagtattagtggttgaatttattaatgaaatttgtcctgagtctggaggggttagttcagagttcttccactgtatgtttgaagagatgaccaagccagaatatggaatgttcatgtatcctgaaatgggttcctgcatgtggtttcctgccaagcctaaacctgagaagaaaagatatttcctctttggaatgctgtgtggactctccttattcaatttaaatgttgctaaccttcctttcccactggctctgtataaaaaacttctggaccaaaagccatcattggaagatttaaaagaactcagtcctcggttggggaagagtttgcaagaagttctagatgatgctgctgatgacattggagatgcgctctgcatacgcttttctatacactgggaccaaaatgatgttgacttaattccaaatgggatctccatacctgtggaccaaaccaacaagagagactatgtttctaagtatattgattacattttcaacgtctctgtaaaagcagtttatgaggaatttcagagaggattttatagagtctgtgagaaggagatacttagacatttctaccctgaagaactaatgacagcaatcattggaaatactgattatgactggaaacagtttgaacagaattcaaagtatgagcaaggataccaaaaatcacatcctactatacagttgttttggaaggctttccacaaactaaccttggatgaaaagaaaaaattcctctttttccttacaggacgtgataggctgcatgcaagaggcatacagaaaatggaaatagtatttcgctgtcctgaaactttcagtgaaagagatcacccaacatcaataacttgtcataatattctctccctccctaagtattctacaatggaaagaatggaggaagcacttcaagtagccatcaacaacaacagaggatttgtctcacccatgctcacacagtcataatcacctctgagagactcagggtgggctttctcacacttggatccttctgttcttccttacacctaaataatacaagagattaatgaatagtggttagaagtagttgagggagagattgggggaatggggagatgatgatgatggtcaaagggtgcaaaatctcacacaagactgaggcaggagaatagggtacagagatagggatctaaggatgacttggacacactccctggcactgaagagtctgaacactggcctgtgattggtccattccaggaccttcatttgcataaggtatcaaaccacatcagcctctgattggccatgggccagacctgcactctggccaatgattggttcattccaggacattcatttgcataaggagtcaaaccacaccagtcttggattggctgtgagccaattcacctcagtctctaattggctgtgagtcagtctttcatttacatagggtgtaaccatcaagaaacctctacagggtacttaagccccagaagattttgctaccagggctcttgagccacttgctctagcccactcccaccctgtggaatgtactttcacttttgctgcttcactgccttgtgctccaataaatccactccttcaccaccca

SEQ ID NO: 272 - DNA, 2506 bp, Homo sapiens
attgatcgctttctgcaaccattcagactgatctcgggctcctatttcatttacattgtgtgcacaccaagtaaccagtgggaaaactttagagggtacttaaaccccagaaaattctgaaaccgggctcttgagccgctatcctcgggcctgctcccaccctgtggagtgcactttcgttttcaataaatctctgcttttgttgcttcattctttccttgctttgtttgtgtgtttgtccagttctttgttcaacacgccaagaacctggacactcttcactggtaacatattttggcaagccaaccaggagaaaagaatttctgcttggacactgcatagctgctgggaaaatgaacatcagtgttgatttggaaacgaattatgccgagttggttctagatgtgggaagagtcactcttggagagaacagtaggaaaaaaatgaaggattgtaaactgagaaaaaagcagaatgaaagtgtctcacgagctatgtgtgctctgctcaattctggagggggagtgatcaaggctgaaattgagaatgaagactatagttatacaaaagatggaataggactagatttggaaaattcttttagtaacattctgttatttgttcctgagtacttagacttcatgcagaatggtaactactttctgatttttgtgaagtcatggagcttgaacacctctggtctgcggattaccaccttgagctccaatttgtacaaaagagatataacatctgcaaaagtcatgaatgccactgctgcactggagttcctcaaagacatgaaaaagactagagggagattgtatttaagaccagaattgctggcaaagaggccctgtgttgatatacaagaagaaaataacatgaaggccttggccggggttttttttgatagaacagaacttgatcggaaagaaaaattgacctttactgaatccacacatgttgaaattaaaaacttctcgacagaaaagttgttacaacgaattaaagagattctccctcaatatgtttctgcatttgcaaatactgatggaggatatttgttcattggtttaaatgaagataaagaaataattggctttaaagcagagatgagtgacctcgatgacttagaaagagaaatcgaaaagtccattaggaagatgcctgtgcatcacttctgtatggagaagaagaagataaattattcatgcaaattccttggagtatatgataaaggaagtctttgtggatatgtctgtgcactcagagtggagcgcttctgctgtgcagtgtttgctaaagagcctgattcctggcatgtgaaagataaccgtgtgatgcagttgaccaggaaggaatggatccagttcatggtggaggctgaaccaaaattttccagttcatatgaagaggtgatctctcaaataaatacgtcattacctgctccccacagttggcctcttttggaatggcaacggcagagacatcactgtccagggctatcaggaaggataacgtatactccagaaaacctttgcagaaaactgttcttacaacatgaaggacttaagcaattaatatgtgaagaaatggactctgtcagaaagggctcactgatcttctctaggagctggtctgtggatctgggcttgcaagagaaccacaaagtcctctgtgatgctcttctgatttcccaggacagtcctccagtcctatacaccttccacatggtacaggatgaggagtttaaaggctattctacacaaactgccctaaccttaaagcagaagctggcaaaaattggtggttacactaaaaaagtgtgtgtcatgacaaagatcttctacttgagccctgaaggcatgacaagctgccagtatgatttaaggtcgcaagtaatttaccctgaatcctactattttacaagaaggaaatacttgctgaaagccctttttaaagccttaaagagactcaagtctctgagagaccagttttcctttgcagaaaatctataccagataatcggtatagattgctttcagaagaatgataaaaagatgtttaaatcttgtcgaaggctcacctgatggaaaatggactgggctactgagatatttttcattatatatttgataacattctctaattctgtgaaaatatttctttgaaaactttgcaagttaagcaacttaatgtgatgttggataattgggttttgtctattttcacttctccctaaataatcttcacagatattgtttgagggatattaggaaaattaatttgttaactcgtctgtgcacagtattatttactctgtctgtagttcctgaataaattttcttccatgcttgaactgggaaaattgcaacacttttattcttaatgacaacagtgaaaatctcccagcatatacctagaaaacaattataacttacaaaagattatccttgatgaaactcagaatttccacagtgggaatgaataagaaggcaaaactcat

SEQ ID NO: 273 - DNA, 3667 bp, Homo sapiens
gcggtggcactcacggaatctcgggtcttctgacgtgccgggcgggaagatgtcatcattgccaagaagagcgaaagtacaggtccaggatgtggtactgaaagatgaattttcttcattctctgagttatcatctgcctctgaagaagatgacaaggaagatagtgcctgggagccccaaaagaaagttcccagaagccgtaaacagccccctcccaaggaatccaaaccaaagaggatgcctcgggtgaagaagaatgccccacagatcagtgatggctcagaagtcgttgttgttaaggaggagctgaatagctctgtggctattgctgatactgctttagaagacagaaaaaataaattggatactgtacagactctgaaaacagccaagacaaaacagaaatgtgcagcgcagccacatacagttcgaaggactaaaaagctgaaagttgaagaagaaaccagcaaagccagcaacttagagggtgagagtaatagttcagagacaccatccacaagcactgtgtggggaggtacatgcaagaaggaagagaatgacgatgactttacatttggtcagtccgctttaaagaaaatcaagactgagacatatcctcaggggcagcctgtcaagtttccagcaaatgccaatagtactaaagaggaggtggaaatgaattgggacatggtacaggttttatctgagagaactaatattgaaccttgggtttgtgccaacatcattcgtctctttaatgatgataacacaattcccttcattatacgttatagaaaagagctcattaataaccttgatgctgattccttgagagaagttcagcaaaccctagaagagctacgggctgttgcaaagaaagttcatagtacaatccagaaaattaagaaggaagggaagatgtctgagtgcttgttaaaagccatgctgaattgtaaaacttttgaagaactagaacacgtgtctgctccatataaaactggaagcaaagggactaaagcccagagagcaagacagttgggcttagaaggagcagccagggcactgcttgagaaaccaggggagctcagtctgctatcgtacattaggcctgacgttaaagggctttcaacgcttcaggatattgaaataggagtgcagcatattttagcagatatgattgctaaagacaaagacacgcttgacttcattcggaacttgtgccagaagagacatgtttgtatccagtcatctctggcaaaagtatcctcaaaaaaggtaaatgagaaagatgttgataagtttctgctctaccagcatttttcctgcaacataagaaacattcaccatcatcagattctggcaattaaccgtggagaaaatttgaaggtactgacggttaaggtcaatatttctgatggagtgaaggatgaattctgtaggtggtgcatccaaaacaggtggagaccacgtagctttgcaaggccagagttaatgaagatcttatataattcactgaatgattcctttaaacgccttatttatcctcttctctgtagagaattcagagccaaactaacatcagatgcagagaaggaatcagtaatgatgtttggacggaaccttcgtcagctccttttaacaagccctgttccagggcgcaccttaatgggagtggatcctggttataaacatggttgcaaattagctataatttctcctactagtcagatacttcatactgatgtggtttacttgcattgtggacaaggcttccgagaggcggagaaaataaagacacttttgctgaatttcaactgcagcacagtagtgattggaaatggaactgcctgcagggaaacagaagcttactttgctgacctgataatgaagaattattttgcaccactggatgttgtttactgtatcgtcagtgaagcaggagcatcaatctacagtgtcagccctgaagctaacaaagagatgccagggctggaccctaatttgagaagtgcagtttccatagcaaggcgtgtacaagatccattagctgagctagtgaaaattgagccaaagcacattggagttggaatgtatcagcatgacgtatcccagactttactcaaggcaacactggacagtgttgtagaagaatgtgtcagctttgtgggagtggatattaacatctgttcagaagttttgttaaggcatattgcaggactcaatgccaacagggccaaaaatattattgaatggcgagagaaaaatggaccctttatcaaccgagaacagctgaagaaagtgaaagggctgggcccaaaatccttccaacagtgtgctggcttcatcagaatcaaccaggattatatccgaacgttttgcagtcagcaaactgaaacttcaggccaaattcaaggagttgctgtgacatcttcagcagacgttgaggtcacaaatgagaagcagggcaaaaagaagagcaaaactgcagtgaatgttttactgaagccaaatcctttggaccaaacttgtattcatccagaatcatatgacatagcaatgaggtttttgtcatccattggagggacactgtatgaggttggaaagcctgaaatgcaacaaaaaataaattcattccttgaaaaggaaggaatggagaaaattgcagaaagattgcaaacaacagtacacaccttacaggtcatcatagatggtctcagccagcctgaaagctttgactttcgaacagattttgataaacctgatttcaagagaagcatagtatgcctggaagatctgcagattgggacagttcttacaggcaaagttgagaatgccactctctttggaatttttgtggatataggagtggggaaatctgggctgattcccatacgaaatgtaacagaagcaaaactttcaaaaacaaagaagagaagaagccttggactgggccccggagaaagagtggaagtccaagtactcaacattgacatcccccgatctaggattactctggacctcattcgggtgttatgagtatcccacgaaggccagacgctgattttattttctcatttccacagattgacaaggataagtcagttgtttgtaaactctaggtagcagatgagaaataattcacttaatatcagaaatattttccaaacactttcctttattttttcttctgaataaatagaaaaccaacagtttgatttccttttcccttaaaggaaacaactaatacacattcttatatggctttatgtagtaatagttttctgactaaaattttgttttttattttttgtaatttatctttaactccttttgcattttgtataacagattgcttaacttctacttgccaacatctgccttgctggacttgtatgggattgtcttcttgatttgaattgtaccgtctttgttgacacagtagggctgggcagtgtttaatccttccattttatagatttttttttaatcaggccttttggacttcattcataattttgcaataatctcttttcccttgtcatgcaagccaaaaatataccagtaaaacagattctgacgtgtttgtagttatcaaatgaatggctcgaaacacttctcaaaaggatatacgtattgaccccaacaataaatgtttgtggctagtga

SEQ ID NO: 274 - DNA, 6557 bp, Homo sapiens
cgggtagtggagccgcaagccaccggcatcttgctttttcttccccctcctcctgtgtgccccgcgccgctccctctttcccttttattcccggccccacccgccaaaatgaacagctcggacgaagagaagcagctgcagctcattaccagtctgaaggagcaagcaataggcgaatatgaagaccttagagcagagaaccagaaaacaaaggagaagtgtgacaaaattaggcaagaacgagatgaagccgttaaaaaactggaagaatttcagaaaatttctcacatggtcatagaggaagttaatttcatgcagaaccatcttgaaatagagaagacttgtcgagaaagtgctgaagctttggcaacaaagctaaataaagaaaataaaacgttgaaaagaatcagcatgttgtacatggccaagctgggaccagatgtaataactgaagagataaacattgatgatgaagattcgactacagacacagacggtgccgccgagacttgtgtctcagtacagtgtcagaagcaaattaaagaacttcgagatcaaattgtatctgttcaggaggaaaagaagattttagccattgagctggaaaatctcaagagcaaactcgtagaagtaattgaagaagtaaataaagttaaacaagaaaagactgttttaaattcagaagttcttgaacagagaaaagtcttagaaaaatgcaatagagtgtccatgttagctgtagaagagtatgaggagatgcaagtaaacctggagctggagaaggaccttcgaaagaaagcagagtcatttgcacaagagatgttcattgagcaaaacaagctaaagagacaaagccaccttctgctgcagagctccatccctgatcagcagcttttgaaagctttagacgaaaatgcaaaactcacccagcaacttgaagaagagagaattcagcatcaacaaaaggtcaaagaattagaagagcaactagaaaatgaaacactccacaaagaaatacacaacctcaaacagcaactggagcttctagaggaagataaaaaggaattggaattgaaatatcagaattctgaagagaaagccagaaatttaaagcactctgttgatgaactccagaaacgagtgaaccagtctgagaattcagtacctccaccacctcctcctccaccaccacttccccctccacctcccaatcctatccgatccctcatgtccatgatccggaaacgatcccaccccagtggcagtggtgctaagaaagaaaaggcaactcaaccagaaacaactgaagaagtcacagatctaaagaggcaagcagttgaagagatgatggatagaattaaaaagggagttcatcttagacccgttaatcagacagccagaccgaagacaaagccagaatcttcgaaaggctgcgaaagtgcagtggatgaactaaaaggaatactggcctcccagtagcattggatgcaggaaaaaatacattgacggtgaaaaacaagccgaaccagttgtagttttagatcctgtttctacacatgaaccccaaaccaaagaccaggttgctgaaaaagatccaactcaacacaaggaggatgaaggcgaaattcaaccagaaaacaaagaagacagcattgaaaacgtgagagagacagacagctccaactgctgatccataaaccagaagcctgacatgtttggaagtccttttcaataagcacatgattagtgttgttatattggcaagggctgtagacattctgctctggtcactgtattcagaatacaggttcttttctggtgtcacttttgtaagtagcaactataaacataagtaagctgtttagcaaaacacacattcctagtaggttttggttttttgatctttataaagatgaggtttttttcctagttactgtattaagtatgacttcttttagaaggttacaaaaaaattcagatgttgatacctttttaggaaatgtgcataccactcatcaaatggaatgctgaaagtttgaggtgcttgtatataatcggataaacaaaactgatcaacccaatgtgattttaaaagcccccaaagaagcttctgttttgggtctgatcctcttgatggagaaactgcagcagcatggaaattgttgggtactgtggcatacaagttattttctacagtagactgagataaactgaaaactcaggagctggcatcaaactcgtagtcccatagtcagtgttaattacacacattgttaactattggatgaaaaatacatgctattgattgtgtccaaagcctcccgaggacctccgtggggatgctctggtagcctgaatacagaactgaggtgaaagtccaaaccttgaattttacagtagtaagttggtaaaccatgtgctctgtgctatgagttaattatgttttcccaaatactaatgtggcacaagtaccatattttatcagagttcttatgtacagtatggtgaagataagtgacaagcacacatttttcttgcttcactgctgttctatattacacaggtttgttgttgttttttttaaaaaagaaattaagcagtagttagtctctaaaaatacaatgtttcaggctaccacagtgaataaatagaaatgtaatcagggattaaaaaaaaaacttatgcagcttttcaaagttgattgtttcaaaattggtgtttatttaaaataagtggtaatgtacttgaatgcactttttatgacaatgattcagtaatggtaattttactattaaagaaagtgaaaggtttagttttgttagcatggctcagcatgtagctgtcaggtgtttttcacctaagggcaaaagaaaatgatagtaataattgcagtagttgtattgtattgtatttttgcacgtgtggtaagcataggcttgaagaggtgggtaggcaggtacatgtacttcctaaatttggagataattatctttctgtaagttcgttatgcttgactgtttccatgttctcccaataatgattttatagttacttatcactttactcatggagaattaaaacgtaatgtttttcaactgtatctttctttaactggataatactgctatatgatatgcttactacagactgcattaattcacgaaacgaattctgttatgctgtaatttgaactctcctcaccacaacttattaaaaaggcaccaatagtttcccattaagggtcagttgtggttattattaacgtttctggtttagttccccaagcttgacattctttaatagaaaattgtatatgatttgacaactttagtaatttttaatagtccctaagatggtttattgagttttctttcatgtttctttgtgctgtcttccttcttgcatctgtgatctgtctgccagcatgcaactcacacacatttaggaatataaaaatatgtacactgtctttccatatttcatcacaccatcacagaataatatggttatcaaaataccctcctttctagagtaagaagttgccctttgggtgaaatgtgttagctggactagggaacaattagtaacaggtattttgaaagtattcctgccttttttaagctgcttactttctctcactgtgattacaaagcattttaaattaatttgacatgaaggtatttgatggaagatattcactcacctttttctgcctacagtttttcccttttcactttggttttgagggggttttgcccctggctggggtgacactgtcaaccaaagcaagggatcccaaataggaagacataggagaaccgtgcttatatctgcaaggtatgttcatagctattgcacacacaaaacttacatacgtcctgcttacacaattttaagttggaaaagactgcatctttatgtttttgatttctctaaaaggttatttatgcttccttctgtttgggaaagataaattaagtcttgtgcgctatagaggattttttttctttaagaaaaacgaatgttgatgcattttatagcccgagtgaggaacagagatagaggtactttgtgccattgctattaaagaaaaagaaaatgtctctttttttttctggaagaataagattttaattaaagcacttgcacccttttgtatgtgagctggtctcaaacaaagtcctcacccacagcagtttcagcagctgaacagtcccatggaagttctgactggcaggcatcaacagggctattagcacccagcatagtttgccctgagtacggaggatggatgctttggctctaactactcaccaataattgctccttccttaccttctttgttaatggtaaactgctggaaatggagtagtacaggtaacaattatttttaattgtctttccagaccagtttttggttgtgtgttcagtaaatgatagtctgtatcacagccttcaagtctggattatttttctaaatgcatactctacctgttcagttacactcgttgtggaacaacattagcttatataccagtaagttgtcgagaatggataaccatctgtcattatcactgaccttcaaagactcatcaagcagtccctgcataaggattggagtggtttgaagtttctcttccaagcactaacatgtccctatcccacagtcattttaatttggtatgtgactgtttctttcatttctttcacagataatattatatatacagttatataaatatatttcatattaaatgttatataacacaagagagagaaagtataagtagaaagagtgcctagcaccctaagaaatttaaattaaaatgctaattatccattggtgagtgcagtctcgaggataggtgagtaaactgctctgtgttgaagtcacactgctgacctggttattgtaataaatcacctctttggttaatttaatttagttattttgttattcattgtacatttttgctctggttttagtaatttaattataatttatatcactgttccagggcatagtctcatgatgtgtgtgtgtgtgtgtgtgtgtgtgtgtgtatttttcaaagggtatgtgaacacccagtcatgtttgttctgcctttcaaatgaattttccttccagtttctcctacccgttgcttgttgctaagcatcaggagaggcagtagcagccacaaactgtgacacagttcttccaacttagagtgataccaaccaagtctcctgcatgctctgagagagtctgcgcctgagccagtttcaaatcatagctttgagaataaagagttggctctgttatgaggaaattaaggtcccttgttagtactctttaaaaggagaggtcctcagtgtgcttaataaaaattatagaatttgtcagaagtctaaacttagccaactcccctacaggtcagtacatagcaatttatataatttttaggagaagcaaatggtaaccattttaacgagaccctaaatcatataaagtggttggatattattatatctatatgtttgtgtctgaatatatttatttctgctactcctctgctataatcccaacactggcttacaaaagagcaattcaggcaatggatatgtcacatcattttttttttttttttttatcacttgcggattgctttttaaatgctgtggtatgaataactgggcatttaataaccttgagaatattaattcatttactgatgtgcttattcatttatactcattcttactccaaaaaggatctaagaagactcgcaaagataaaaataatacaagaaaaactaaaatttaaaaaggagagggaattaggaaaaaaggaatcaagggtaggaaagtgagatgaaattggctcttacaaaaaatggtgatgctctcacacttctacgtgaggttggttacaaaaatgtgtcagtgcttttcagcacagacatgtagaataaacacagaagatggacatctgttcccagcacagagagcttctagggtcattaggtttttgttctcagagatattctgattggtaaaggatggggtgtttgactgagtgtggagttggcaacaaaaatattggcctcttttactggagcgtgtccctgaaaaatggacaggagagctaatagacaaacaaaatccacatggaagtgtggtggctgcaaaacgaagttcacagaatttcaggcaaaaacatcatatatgtaatttaccaaacagtggaattagaagaataaaaaccacaagagttggtgaagttgaagaggaaactccatgtggagacacggcgccgtacttcagacctcccggtctactaatactgatggtgtggctggaacctggggtgtgtacagccctatccagaggatgctcctgtttcggctgattcctctacaccttgtgtggggaaggtgggcaccagcggctccctagccgcagcagcctcaagtgcctccgcagccttttcagcttcctcattaaagtaaaaaaaagtgtgttcttctttgaaacctatttaaagtaacaataaagtttactgtctaatccaa

SEQ ID NO: 275 - DNA, 3284 bp, Homo sapiens
atacactgccgcggccgccgcaggagcccggagctcgagccgcccagcgactccccctccccctcccccagccccgccccgccccaacccggggctccgagccggagccgagtctgcgcctgggggaggaccatgcggcagtagcagccatgctgccctttctgctggccacactgggcaccacagccctcaacaacagcaaccccaaggactactgctacagcgcccgcatccgcagcactgtcctgcagggcctgccctttgggggcgtccccaccgtgctggctctcgacttcatgtgcttccttgcactgctgttcttattctctatcctccggaaggtggcctgggactatgggcggctggccttggtgacagatgcagacaggcttcggcggcaggagagggaccgagtggaacaggaatatgtggcttcagctatgcacggggacagccatgaccggtatgagcgtctcacctctgtctccagctccgttgactttgaccaaagggacaatggtttctgttcctggctgacagccatcttcaggataaaggatgatgagatccgggacaaatgtgggggcgatgccgtgcactacctgtcctttcagcggcacatcatcgggctgctggtggttgtgggcgtcctctccgtaggcatcgtgctgcctgtcaacttctcaggggacctgctggagaacaatgcctacagctttgggagaaccaccattgccaacttgaaatcagggaacaacctgctatggctgcacacctccttcgccttcctgtatctgctgctcaccgtctacagcatgcgtagacacacctccaagatgcgctacaaggaggatgatctggtgaagcggaccctcttcatcaatggaatctccaaatatgcagagtcagaaaagatcaagaagcattttgaggaagcctaccccaactgcacagttctcgaagcccgcccgtgttacaacgtggctcgcctaatgttcctcgatgcagagaggaagaaggccgagcggggaaagctgtacttcacaaacctccagagcaaggagaacgtgcctaccatgatcaaccccaagccctgtggccacctctgctgctgtgtggtgcgaggctgtgagcaggtggaggccattgagtactacacaaagctggagcagaagctgaaggaagactacaagcgggagaaggagaaggtgaatgagaagcctcttggcatggcctttgtcaccttccacaatgagactatcaccgccatcatcctgaaggacttcaacgtgtgtaaatgccagggctgcacctgccgtggggagccacgcccctcatcctgcagcgagtccctgcacatctccaactggaccgtgtcctatgcccctgaccctcagaacatctactgggagcacctctccatccgaggcttcatctggtggctgcgctgcctggtcatcaatgtcgtcctcttcatcctcctcttcttcctcaccactccagccatcatcatcaccaccatggacaagttcaacgtcaccaagcctgtggagtacctcaacaaccccatcatcacccagttcttccccaccctgctgctgtggtgcttctcggccctccttcccaccatcgtctactactcagccttctttgaagcccactggacacgctctggggagaacaggacaaccatgcacaagtgctacactttcctcatcttcatggtgctgctcctaccctcgctgggactgagcagcctggacctcttcttccgctggctctttgataagaaattcttggctgaggcagctattcggtttgagtgtgtgttcctgcccgacaacggcgccttcttcgtgaactacgtcattgcctcagcctttatcggcaacgccatggacctgctgcgcatcccaggcctgctcatgtacatgatccggctctgcctggcgcgctcggccgccgagaggcgcaacgtgaagcggcatcaggcctacgagttccagtttggcgcagcctacgcctggatgatgtgcgtcttcacggtggtcatgacctacagtatcacctgccccatcatcgtgcccttcgggctcatgtacatgctgctgaagcacctggtagacaggtacaatctctactacgcctacctgccggccaagctggacaagaagatccactcgggggctgtgaaccaggtggtggccgcgcccatcctctgcctcttctggctgctcttcttttccaccatgcgcacggggttcctagctcccacgtctatgttcacatttgtggtcctggtcatcaccatcgtcatctgtctctgccacgtctgctttggacacttcaaatacctcagtgcccacaactacaagattgagcacacggagacagatactgtggaccccagaagcaatggacggccccccactgctgctgctgtccccaaatctgcgaaatacatcgctcaggtgctgcaggactcagaggtggacggggatggggatggggctcctgggagctcaggggatgagcccccatcatcctcatcccaagatgaggagttgctgatgccacccgacgccctcacggacacagacttccagtcttgcgaggacagcctcatagagaatgagattcaccagtaaggggagggaggggccctggaggccacatcctgccccaccccacccccactcccacggacactaaaacgctaataatttattagatctaaagccccttcctccccagcccctgctttcattaaggtatttaaacttgggggtttcactgctctcccccatgatggagggagggagccccccaacctcagtgaggagagccccgagccggccccggggcaaagaggggtgcagagggagttcccccagatcagtaccccccacccctccccagctagtagcatgaccaggagagggttaatgagagccaagaggagtacctggtgcacctggtgccggtggctggagacctggggggcaggtggatctggggctgttcccccccctccgttttttccaccccacagttcctcctgggatctggccctccagggaagtggagcctccagcccctaggggatgcatgaggggggagggggtgctgagtgggaggaagagtcaggctcacagctggggtggcctgggggtgggggtgggcaaggctgacactggaaaatgggtttttgcactgttttttttttggtttttttgttcttttttgtttttttcctttaaaataaaaacaaagaaaagctctga

SEQ ID NO: 276 - DNA, 1444 bp, Homo sapiens
gagacagcttcaggacacgcaggccgcagcgagggcccgggccctggggatcccaggccatggatgctccccactccaaagcagccctggacagcattaacgagctgcccgagaacatcctgctggagctgttcacgcacgtgcccgcccgccagctgctgctgaactgccgcctggtctgcagcctctggcgggacctcatcgacctcatgaccctctggaaacgcaagtgcctgcgagagggcttcatcaccaaggactgggaccagcccgtggccgactggaaaatcttctacttcctacggagcctgcataggaacctcctgcgcaacccgtgtgctgaagaggatatgtttgcatggcaaattgatttcaatggtggggaccgctggaaggtggagagcctccctggagcccacgggacagattttcctgaccccaaagtcaagaagtattttgtcacatcctacgaaatgtgcctcaagtcccagctggtggaccttgtagccgagggctactgggaggagctactagacacattccggccggacatcgtggttaaggactggtttgctgccagagccgactgtggctgcacctaccaactcaaagtgcagctggcctcggctgactacttcgtgttggcctccttcgagcccccacctgtgaccatccaacagtggaacaatgccacatggacagaggtctcctacaccttctcagactacccccggggtgtccgctacatcctcttccagcatgggggcagggacacccagtactgggcaggctggtatgggccccgagtcaccaacagcagcattgtcgtcagccccaagatgaccaggaaccaggcctcctccgaggctcagcctgggcagaagcatggacaggaggaggctgcccaatcgccctaccgagctgttgtccagattttctgacagctgtccatcctgtgtctgggtcagccagaggttcctccaggcaggagctgagcatggggtgggcagtgaggtccctgtaccagcgactcctgccccggttcaaccctaccagcttgtggtaacttactgtcacatagctctgacgttttgttgtaataaatgttttcaggccgggcactgtggctcacgcctgtaatcccagcactttgggagaccgaggcaggtggatcacgaggtcaggagatagagaccatcctggccaacacggtgaaaccctgtctctactaaaaatacaaaaaattagccgggcgtggtggcgggcgcctgtagtcccagctactcgggaggctgatgcagaagaatggcgtgaacccggaaggcagagcttgcagtgagccgagatcacgccactgcactccagcctgggtgacagagcgagactctggctcataaaataataataataataaataaataaaaaataaatgttttcagtaaaa

SEQ ID NO: 277 - DNA, 4440 bp, Homo sapiens
agccccgcgctcgtctttggggccaccggtcgcccccgcctccgggacctgcggggagggcccgcgagagatggagacgagagatctggacttctgaacatctaccggaaaagataaaatgtgcaagcccttcagaacgctggggaggttgggctgaactgcagtgggagaggagaagagatgctggcgtgaaggggagtccccggcgtgcagtggagcctcgctgggggaaatgacagcttggaccatgggcgcccgcggtctggacaagcgaggaagtttctttaagctcattgacacaattgcctcggagatcggagaactgaaacaggagatggtgcggacagatgtcaacctggaaaatggcctggaacccgctgaaacccacagcatggtaagacacaaggatggtggctattccgaggaagaggacgtgaagacctgtgcccgggactcaggctatgacagcctctccaacaggctcagcatcttggaccggctcctccacacccaccccatatggctgcagctgagtctgagtgaggaggaggcagcagaggtcctgcaggcccagcctccggggatcttcctggttcataaatctaccaagatgcagaagaaagtcctctccctccgcctgccctgtgaatttggggccccactcaaggaatttgccataaaggaaagcacatacaccttttccctggaaggctcaggaatcagtttcgcagatttattccggctcattgctttctactgcatcagcagggatgttctaccatttaccttgaagttgccttatgccatttcaacagccaagtcggaggctcagcttgaagaactggcccagatgggactaaatttctggagctccccagctgacagcaaacccccgaaccttccacctccccataggcctctttcctccgacggtgtctgtcctgcctccctgcgtcagctctgccttataaatggagtgcattctatcaaaaccaggacgccttcagagctggagtgcagccagaccaacggggccctgtgctttattaatccccttttcttgaaagtgcacagccaggacctcagtggaggcctgaaacggccgagcacaaggactcccaacgcgaatggcacggagcggactcggtcccccccacccaggcccccgccacccgctattaatagtctccacacaagccctcggctggccaggactgaaacccagacgagcatgccagaaacagtcaaccataacaaacatgggaacgtagctctgcctggaacgaaaccaactcccatccctccaccccggctgaagaagcaggcttcttttctggaagcagagggcggtgcaaagaccttgagcggcggccggccgggcgcaggcccggagctggagctgggcacagctggcagcccaggtggggccccgcctgaggccgccccgggggattgcacaagggccccgccgcccagctctgaatcacggcccccgtgccatggaggccggcagcggctgagcgacatgagcatttctacttcctcctccgactcgctggagttcgaccggagcatgcctctgtttggctacgaggcggacaccaacagcagcctggaggactacgagggggaaagtgaccaagagaccatggcgccccccatcaagtccaaaaagaaaaggagcagctccttcgtgctgcccaagctcgtcaagtcccagctgcagaaggtgagcggggtgttcagctccttcatgaccccggagaagcggatggtccgcaggatcgccgagctttcccgggacaaatgcacctacttcgggtgcttagtgcaggactacgtgagcttcctgcaggagaacaaggagtgccacgtgtccagcaccgacatgctgcagaccatccggcagttcatgacccaggtcaagaactatttgtctcagagctcggagctggacccccccatcgagtcgctgatccctgaagaccaaatagatgtggtgctggaaaaagccatgcacaagtgcatcttgaagcccctcaaggggcacgtggaggccatgctgaaggactttcacatggccgatggctcatggaagcaactcaaggagaacctgcagcttgtgcggcagaggaatccgcaggagctgggggtcttcgccccgacccctgattttgtggatgtggagaaaatcaaagtcaagttcatgaccatgcagaagatgtattcgccggaaaagaaggtcatgctgctgctgcgggtctgcaagctcatttacacggtcatggagaacaactcagggaggatgtatggcgctgatgacttcttgccagtcctgacctatgtcatagcccagtgtgacatgcttgaattggacactgaaatcgagtacatgatggagctcctagacccatcgctgttacatggagaaggaggctattacttgacaagcgcatatggagcactttctctgataaagaatttccaagaagaacaagcagcgcgactgctcagctcagaaaccagagacaccctgaggcagtggcacaaacggagaaccaccaaccggaccatcccctctgtggacgacttccagaattacctccgagttgcatttcaggaggtcaacagtggttgcacaggaaagaccctccttgtgagaccttacatcaccactgaggatgtgtgtcagatctgcgctgagaagttcaaggtgggggaccctgaggagtacagcctctttctcttcgttgacgagacatggcagcagctggcagaggacacttaccctcaaaaaatcaaggcggagctgcacagccgaccacagccccacatcttccactttgtctacaaacgcatcaagaacgatccttatggcatcattttccagaacggggaagaagacctcaccacctcctagaagacaggcgggacttcccagtggtgcatccaaaggggagctggaagccttgccttcccgcttctacatgcttgagcttgaaaagcagtcacctcctcggggacccctcagtgtagtgactaagccatccacaggccaactcggccaagggcaactttagccacgcaaggtagctgaggtttgtgaaacagtaggattctcttttggcaatggagaattgcatctgatggttcaagtgtcctgagattgtttgctacctacccccagtcaggttctaggttggcttacaggtatgtatatgtgcagaagaaacacttaagatacaagttcttttgaattcaacagcagatgcttgcgatgcagtgcgtcaggtgattctcactcctgtggatggcttcatccctgccttccttcctttctttttccttttttttttttttttttttttttttacaaagagccttcatgtttttatatatttcatagaaatttttatagcagttgcaggtaaactgtcaggattggttttaaaatatttttgtaactttaaaatattctataattatgcatgtgattttaacatttaatattcaaaaataaatctcttgctggatttgagagtattgcatttttaaagtctctcttctgtaactggatgttttggcaactttgtggggagagactgctggatttcttaaagcaacgtattcctgacactggccacagaatgcctttggaaatcggatgtactgttctcttgttcacgtttagtggtgttttgctgttttgttttttaaacaaatgatgctgagaataaggagagaaatgaatgtagagagaggtagagagagaaatatgaactctaacaaaggactgaggagtgcagtctgctggttcaggctcttcaaaagatgtagaaaaagagatagaaggaaccacctatgcttaaaatactgtaaatatgcagtgaggtttggcaaaatctattccatgtgtgatttgcttgtagaaacaattttgaaagccccttgaggaaaataaaaatcaagaagaacacttttctcccttttccatacaaattaaaacttaacagcatcaaattattgggaccagaaaccaagtaatgtataatgtggcttttgttgagttaaataagatgctatataatggagaagaatttgaaaatgcacaaaaaaatcaatctacattatcagaacctgcagtgaaattaaacttatgttaaataaaaccagtttgcaggtgcacaaactatgagggtcttgtatccacgtaacacaggtagttacaaaaacatgttattgtactgtgtaaagatgcatagtcatctcatttggttggctttgtaccttgtaccttttttagccttggcttttgttgaactagaaccctcagcacatactgtgttgtacttttgtaaatgattttttaaatggaattttgcacataatacattgtaatactgtatgataatcatgtgtgaaaataatttttgaaatatc

SEQ ID NO: 278 - DNA, 10115 bp, Homo sapiens
atccgcggagcgacgaccggaggctgcggcggagccccggcggggcgtttggtttcggtttggccctgactgggattagtgttgacgatcgaaatgggagtccccaagttttacagatggatctcagagcggtatccctgtctcagcgaagtggtgaaagagcatcagattcctgaatttgacaacttgtacctggatatgaatggaattatacatcagtgctcccatcctaatgatgatgatgttcactttagaatttcagatgataaaatctttactgatatttttcactacctggaggtgttgtttcgcattattaaacccaggaaagtgttctttatggctgtagatggtgtggctcctcgagcaaaaatgaaccagcagcgtgggaggcgttttaggtcagcaaaggaggcagaagacaaaattaaaaaggcaatagagaagggagaaactcttcctacagaggccagatttgattccaactgtatcacaccaggaactgaatttatggccaggttacatgaacatctgaagtattttgtaaatatgaaaatttccacagacaagtcatggcaaggagttaccatctacttctcaggccatgagactcctggagaaggagagcataaaatcatggaatttatcagatccgagaaagcaaagccagatcatgatccaaacaccagacactgtctttatggtttagatgctgacttgattatgcttggattaacaagtcatgaggcacatttttctctcttaagagaagaagttcgatttggtggcaaaaaaacacaacgggtatgtgctccagaagaaactacatttcaccttctacacttgtctttaatgagagagtatattgactatgagttttcagtattaaaagaaaagatcacatttaaatatgatattgaaaggataatagatgattggattttgatggggtttcttgttggtaatgattttatccctcatctacctcatttacatattaatcatgatgcactgcctcttctttatggaacatatgttaccatcctgccagaacttgggggttatattaatgaaagtgggcacctcaacttacctcgatttgagaaataccttgtgaaactatcagattttgatcgggagcacttcagtgaagtttttgtggacctaaaatggtttgaaagcaaagttggtaacaagtacctcaatgaagcagcaggtgtcgcagcagaagaagccaggaactacaaggaaaagaaaaagttaaagggccaggaaaattctctgtgttggactgctttagacaaaaatgaaggcgaaatgataacttctaaggataatttagaagatgagactgaagatgatgacctatttgaaactgagtttagacaatataaaagaacatattacatgacgaagatgggggttgacgtagtatctgatgactttctggctgatcaagctgcatgttatgttcaggcaatacagtggattttgcactattactatcatggagttcagtcctggagctggtattatccttatcattatgcacctttcctgtctgatatacacaacatcagtacactcaaaatccattttgaactaggaaaaccttttaagccatttgaacagcttcttgctgtacttccagcagccagcaaaaatttacttcctgcatgctaccagcatttgatgaccaatgaagactcaccaattatagaatattacccacctgattttaaaactgacctaaatgggaaacaacaggaatgggaagctgtggtgttaatcccttttattgatgagaagcgattattggaagccatggagacatgtaaccactccctcaaaaaggaagagaggaaaagaaaccaacatagtgagtgcctaatgtgctggtatgatagagacacagagtttatctatccttctccatggccagaaaagttccctgccatagaacgatgttgtacaaggtataaaataatatccttagatgcttggcgtgtagacataaacaaaaacaaaataaccagaattgaccagaaagcattatatttctgtggatttcctactctgaaacacatcagacacaaattttttttgaagaaaagtggtgttcaagtattccagcaaagcagtcgtggagaaaacatgatgttggaaatcttagtggatgcagaatcagatgaacttaccgtagaaaatgtagcttcatcagtgcttggaaaatctgtctttgttaattggcctcaccttgaggaagctagagtcgtggctgtatcagatggagaaactaagttttacttggaagaacctccaggaacacagaagctttattcaggaagaactgccccaccatctaaagtggttcatcttggagataaagaacaatctaactgggcaaaagaagtacaaggaatttcagaacactacctgagaagaaaaggaataataataaatgaaacatctgcagttgtgtatgctcagttactcacaggtcgtaaatatcaaataaatcaaaatggtgaagttcgtctagagaaacagtggtcaaaacaagttgttccttttgtttatcaaactattgtcaaggacatccgagctttcgactcccgtttctccaatatcaaaacattggatgatttgtttcctctgagaagtatggtctttatgctgggaactccctattatggctgcactggagaagttcaggattcaggtgatgtgattacagaaggtaggattcgtgtgattttcagcattccatgtgaacccaatcttgatgctttaatacagaaccagcataaatattctataaagtacaacccaggatatgtgttggccagtcgccttggagtgagtggataccttgtttcaaggtttacaggaagtatttttattggaagaggatctaggagaaaccctcatggagaccataaagcaaatgtgggtttaaatctcaaattcaacaagaaaaatgaggaggtacctggatatactaagaaagttggaagtgaatggatgtattcatctgcagcagaacaacttctggcagagtacttagagagagctccagaactatttagttatatagccaaaaatagccaagaggatgtgttctatgaagatgacatttggcctggagaaaatgagaatggtgctgaaaaagttcaagaaattattacttggctaaaaggacatcctgtcagtactttatctcgttcttcttgtgatttacaaattctggatgcagctattgttgagaaaattgaggaagaagtcgaaaagtgcaagcaaagaaagaataataagaaggtgcgagtaacagtgaaaccccatttgctatacagacctttagaacagcaacatggagtcattcctgatcgggatgcagaattttgtctttttgaccgtgttgtaaatgtgagagaaaacttctcagttccagttggccttcgaggcaccatcataggaataaaaggagctaatagagaagccgatgtactatttgaagtattatttgatgaagaatttcctggagggttaacaataagatgctcacctggtagaggttatcgactgccaacaagtgccttggtgaacctttctcatgggagtcgctctgaaactggaaatcagaagttgacagccatcgtaaaaccacaaccagctgtacatcaacatagctcaagttcatcagtttcctctgggcatttgggagccctcaaccattcccctcaatcactttttgttcctactcaagtacctactaaagatgatgatgaattctgcaacatttggcagtccttacagggatctggaaagatgcaatactttcagccaactatacaagagaagggtgcagttctacctcaagaaataagccaagtaaatcaacatcataaatctggctttaatgacaacagtgttaaatatcagcaaagaaaacatgaccctcacagaaaatttaaagaagagtgtaagagtcctaaagctgagtgttggtcccaaaaaatgtccaataagcagcctaactctggaattgagaactttttagcatctttgaatatctccaaagaaaatgaagtacagtcatctcatcatggggagcctccaagtgaagagcatttgtcaccacagtcatttgccatgggaacacggatgcttaaagaaattctaaaaattgatggctctaacactgtggaccataagaatgaaatcaaacagattgctaatgaaatccctgtttcctctaacagaagagatgaatatggattaccctctcagcctaaacaaaataagaaattagcatcttatatgaacaagcctcacagtgctaatgagtaccataatgttcagtctatggacaatatgtgttggcctgcccccagccagatccctcctgtatccacaccagtaactgaactttctcgaatttgttcccttgttggaatgccacaacctgatttctcctttcttaggatgccacagacaatgaccgtttgccaagtaaaattatctaatggcttactggtacatgggccacagtgccactctgaaaatgaagccaaagagaaagctgcactttttgctttacaacagttgggctccttaggcatgaatttccctttgccttcacaagtatttgcaaattatccttcagctgtaccacctggaaccattcctccagcctttcccccacctactggctgggatcactatggaagcaactatgcattgggggcagctaatataatgccttcgtcgtctcatctctttggctcaatgccatggggaccatcggtgccagttcctgggaagcccttccatcatactttatattctgggaccatgcccatggctgggggaataccagggggtgtgcacaatcagtttatacctctgcaggttactaaaaaaagggttgcaaacaaaaagaactttgagaataaggaagcccagagttctcaagccactccagttcagactagccagccagattcttccaacattgtcaaagtaagtccacgggagagctcatcagcttctttgaagtcctctccgattgctcaacctgcatcttcttttcaagttgaaactgcctctcaaggccatagtatatctcaccataagtcaacaccaatctcttcttcaagaagaaaatcaagaaaactggctgttaattttggtgtttctaaaccttctgagtaaatttggctcttagaattaagttaatttcttctctttccatctacctttttataaatacatatctatgtctcataaaaattagaatgtactattttaaaataatatgtgtaaattgaaatttttttcatttttaagttatcaggcacttttcatgctgtttaaaagactgtgtatcaaattgtgcactttaagtatgtgcagtttgttgtatgtcaattatacctcaataaatctgtaataaaaaactaaattaaaccttgcattaaaataatatcacagtatcagtggactaaacattaaaatgtaccactctaatcattggcctcatgattgaagcatcctgaactatgaattagacatcagttagcaataataagcattttttacactatcattgaggaataattacatggagcatgaaatttgggcctccagtataacttactgaatgtggattttatttctctttttaatgatgtaagaaaattgtcaggagaatggctcttatttatgtgtgttttaacttatgctttgttgcctctgagggtctttagacctgctgtgaaaggatcacatttgttgtggtgctgccagttttgctttattctaaattttgtaccaaagcaactttagaataatcagaatatttcatctaactgcttagaactataaatagcattctaaatttgagtaaatacaattttttaggttactcaagaaccagcattagtaatttctagtaaaattgtttcaaaatctacagggtacaatgattacaaattaatcttctaacaaaataaaatatgaaatattagtcatgttaattaataaactgtattattttgtatagctttttatttgcttacctgacattttatgagagcttcatagttggtcggtatgtagtgcttcttgggactgaagaaattctaattgttgtttaagttccaaggtgtgctacaatataggaggcacagtcatcagtttgtgacatacattatttactgcctatttcattctgattctatatttttagctttatgctgaactgttcaatgatgctgggattctctctttgcatgtcatatgtgaatgtgtggttcaagctgtaactgttgaaattattttagaatttatgacgatttctcagcagggcctatgtttatatatatatatatatttattctttagtttttgtgatatgcttatatttttaaggaagtaagttatagcatacttttttaaaagtaggaaccacaatctttatatggagcagcttgttatatctgattttcatgtaactcattggaaactctgccatgactcttaaagtagtcttacttgttttttaaaatgctggtattaaactaaatggactcctttcactaactgctgatttcagagtttaaatgttagcaggatatttgtgtattagcagtgccttcagtataagagagaaatattcattatctgtcatttatcatagtcgtataagtttccatgattttattttctgttattttcataagttcagatgtttatcagttcccaacattgtttctttatctgtagtgggatcttgagtaatgaggctcaagtaaatcctcaatgtgtataattattgcctcataaactctctctttgtttttaaaggaaacatctattatggtaatacaaagaaaagttaaattgtgacagtaatgttatattaacctcttcctactttaaagtgtgaaatgtttcacctcagctgtacaaactccagcattgagaatttgcctcactcattactcctgtgtgacagttatataaatagcatgcagctcacatctgttttagagcatagaagaagcggcacctgccatcttctgaaaactccaaagggaaatttcagtagacatagtgcactaaacccataaggatacttgaccaatatttgagcacagcaagctgacagttctatacagataggcagtgaaagagttttattttccagccaggcgcagtggctcaaatcccagcacttcgggaggctaaggcaggcggatcacttgaggtccggagttccagacaagcctggccaacatgatgaagccctgtctctactaaaaatacaaaaattagccgggcgtgatggcacatgcctttagtcccagctactcgggaggctgaggcatgagaatcatttgaacccgcgaggcagagtctgcagtgagccgagattgcaccactgcactccagcctggagagcagagcaagactctgtctcaaaaaaaagaaaaaagttttattatccttactttttttttaacattattattctaaaggtcaaaactgagaagagattaagataggagagagctccataatggctggatagtggtcaggcattctctattcttttccccctgtagacccattctaaatgtgggcctgaggtcaatgggagatgtgccctccctatggaggatgtaagaagcagaggccatttctgccccatgttgaggaaacaatctgttgatagacctggaatttagagtatatctgaaaagcagttggacttcaagaaatttaaaattctctctttgagatggggtggactaagaccacccccaaagtttaaaaatatgctcattcaacttgaatcttctgaggactttttgtgaaaatggtggactgtttagggcataggacagattccccaaattgctttatgcttccacataactagagcacttcaatctatttaagcctttgtctcctaactgaaacattatttctaaatatttctattcaataagttttttcttttttgagcaacttaagtgaattttgaagattgctccttccagtctcgttccttttcacattttcctgcattacctaataattacctcagcgttagaatttgaatgtattaattgatttaaacatcatgtagactaaagtcttaaacatctaagactcagttgtagttgcagaaaaaaattaaagtcacctctactgaaccttggtttcaatttaagatttttcttgcttttcaaaggggtaactaataaagattgaagggtttttttcccgattggtggaggaatgaagaactattgatgcaagtttttttattgtttctttctatgatcaggtacctgctttcattttagactgctacttccaaactaagctagattcttggttttaatgagaggaggcagagagagggaggcagatggaagaagaaaaacagttaaataagacatacccagtcactgcatttttggactataccgtatctttctagcacaaggaaatagataaactgtaaggtcttttttactcactttttatttatgtgttctatttgtgttagtcataactgtttatagtggttgtctaatttttacttttattatatgagatagagctgtgcagatcttcactcaagttagttctgtcacgcttcttcccattatttagagcacagttttttaaagcaactgtacaatttctcagccttatgagcttgctgtatttcttggtatcatgttgcttccaaattttgtttttactgtagaagacaattaatttattgtagagaagtggctgtgaaagtcgttctctgtctttaaaaatcaattgcagaagttcatttgtcatttttctagagataaattatagtactcaaactggcagtgctcagtatatacattttgtaagctttgtcagtgaaaccatcagttttgcaggagcttcctttcctagtcaagataaagcttaaaattccagaaattaatgtcgttcggactgactttattcatatttccatcaaacttctccaatacagtaagagatagtgttgaaccagcatcaagtctccagaaacatggcagagcagacaggccgttaagtttcacagacatcatagatccttttcttaaagaagaaaaacatgtataaaatagttttagtagtccaaaatgtcaactatctgtagctgcttttgtgtgtgtgtcagtgaacaaataataatgccttgctcaatcaatgcattcagccatctcaagtgcaatttgtgaaggagactatggtttccaaaagatacatttttttacaaagttaaacctgtaaaaagtctttttttttttccctccagccgtacaccaactgcacttggttgtttcagcagttggtatactattaaattgtccaggccaaataggtttctgtagctgttttagtaatttgaagccaaattctcatgctgtttctcattaaaaagaatgagaatttggtccatagttagctttaagttctctcttcctttctttcccttacagttaagggtttggtgggggatggggaggttgttttcgttttttggatttttttgtcttttggctttaagtatcatattttcttttgcctgtatccaactgcttctttgagtattttcatctagtttaatgtgagtaatagatgctgtgctgtcattgaagtgttcaacattttgttcatttaaacaaaagtgtaattcatacatatatagatacatatcttaattgatttctcaactattttataagtaactggaatttttcattagatcttatacagagaagtattttattaaaaattcaaaagggaagacttttatgtgctcattttgtaatttttgattttaaatatctttacattgtctgccaattaaagtgttttaaacttgcattggaatggactccgaatgtatttttgtggtgttacgttatccgtagatttctagcatgaagttagcctcacgatgctgtgcaaaggattttaaaatatgagagtcactgaaagagtttaaacatctgttcatgttaaatgctctatggattttaattaaagacttgagaatgatttta

SEQ ID NO: 279 - DNA, 2200 bp, Homo sapiens
agcgtcttggcggcagttggtggaaccggagcttcgagtccgtccccggtgctgcctgcgcgttcacctgagtctcgctggagctcttctcgcccgcccacctcatctcaacccactttccgcggggagcggcgccaagctgggccttcctcggatcaggcgtcccctgaagtcggcacgcccctctgcgtcccccttcggtcccgctaggaccccgtccgggctgccgtcgcctcgtcgctatggcgcccaccatccagacccaggcccagcgggaggatggccacaggcccaattcccaccggactctgcctgagaggtctggagtggtctgccgagtcaagtactgcaatagcctccctgatatccccttcgaccccaagttcatcacctaccccttcgaccagaacaggttcgtccagtacaaagccacttccttggagaaacagcacaaacatgacctcctgactgagccagacctgggggtcaccatcgatctcatcaatcctgacacctaccgcatcgaccccaatgttcttctagatccagctgatgagaaacttttggaagaggagattcaggcccccaccagctccaagagatcccagcagcacgcgaaggtggtgccatggatgcgaaagacagagtacatctccactgagttcaaccgttatggcatctccaatgagaagcctgaggtcaagattggggtttctgtgaagcagcagtttaccgaggaagaaatatacaaagacagggatagccagatcacagccattgagaagacttttgaggatgcccagaaatcaatctcacagcattacagcaaaccccgagtcacaccggtggaggtcatgcctgtcttcccagactttaagatgtggatcaatccatgtgctcaggtgatctttgactcagacccagcccccaaggacacgagtggtgcagctgcgttggagatgatgtctcaggccatgattaggggcatgatggatgaggaagggaaccagtttgtggcctatttcctgcctgtagaagagacgttgaagaaacgaaagcgggaccaggaggaggagatggactatgcaccagatgatgtgtatgactacaaaattgctcgggagtacaactggaacgtgaagaacaaagctagcaagggctatgaggaaaactacttcttcatcttccgagagggtgacggggtttactacaatgagttggaaaccagggtccgccttagtaagcgccgggccaaggctggggttcagtcaggcaccaacgccctgcttgtggtcaaacatcgggacatgaatgagaaggaactggaagctcaggaggcacggaaggcccagctagaaaaccacgaaccggaggaggaagaggaagaggagatggagacagaagagaaagaagctgggggctcagatgaggagcaggagaagggcagcagcagtgagaaggagggcagtgaagatgagcactcgggcagcgagagtgaacgggaggaaggtgacagggacgaggccagtgacaagagtggcagtggtgaggacgagagcagcgaggatgaggcccgggctgcccgtgacaaagaggagatctttggcagtgatgctgattctgaggacgatgccgactctgatgatgaggacagaggacaggcccaaggtggcagtgacaatgattcagacagcggcagcaatgggggtggccagcggagccggagccacagccgcagcgccagtcccttccccagtggcagcgagcactcggcccaggaggatggcagtgaagctgcagcttctgattccagtgaagctgatagtgacagtgactgagtcccagggcattcagggctggttcagacaccattattgtgagcagcaaagcacttttctagtggtctgtttgtgagcctttcacttgtttgttccccacccccaaacctttgctgttaataaagtcaacttctctttacttcccctcccagcccctatgatgtcattcagcccagcacatacctcccgcaacccccaggtgctcaaggatcttggcttgaggcttagaaacacaggccagaggcagggccaatggtttcccacaaaatgtagcacaacgaaggtcagaattcgttttttttgtttgttttttttttttccaaaataagcccagaccattaaacaagtgaaactccaacaaa

SEQ ID NO: 280 - DNA, 3172 bp, Homo sapiens
actgcactgctggctgcagacacaggctgcaccatgaagccagccctcctgccctgggccctgctgctgctggcgacagccctcggcccgggccccggacccacagcagatgcccaagagagctgctccatgcgctgtggcgccctggacgggccatgttcctgccacccgacgtgctctggccttggcacctgctgcttggatttccgggacttctgcctggagatattgccctactcaggatccatgatgggcggcaaggactttgtggtgcggcacttcaagatgtccagccccacagacgccagtgtgatctgcaggtttaaggacagcatccagaccctcggccatgtggactcctccgggcaagtgcactgtgtgtcacctctgctctatgagagcggccgcatccccttcactgtgtcactggacaacggccactccttccctcgtgcgggcacctggctggctgtgcaccccaacaaagtgtcaatgatggagaagagcgagttggtgaacgagacgcgttggcaatactacggcaccgccaacacctcaggcaacctcagcctgacctggcatgtcaagtcgctgcccacgcagaccatcaccatcgaactgtggggctacgaggagacaggaatgccctactcacaggagtggactgcaaagtggtcgtacctgtaccccctggccacacacatccccaactccggctctttcactttcaccccaaaacctgctcctcccagctaccagagatggcgagtgggtgcacttcggatcatcgacagcaaaaattacgcagggcagaaggacgtgcaggcgctctggaccaacgaccacgcactggcctggcacctgagcgatgacttccgagaggaccctgtggcctgggcacgaactcagtgccaggcctgggaggagctggaggatcagctgcccaacttcctggaggagctgccggactgcccctgcaccctgacccaggcccgggctgactccggccgcttcttcacggactacggctgtgacatggagcagggcagcgtgtgcacctaccaccccggggccgtgcactgtgtgcgttctgtgcaggccagcctccggtacggctcaggtcagcagtgctgctacacagcggacgggacgcagctcctgacagctgactccagcggcggcagcactcccgaccgcggccatgactggggcgcacccccgttccgcacgccaccccgagtgcccagcatgtcccactggctctacgatgtcctcagcttctattactgctgcctctgggcacccgactgcccccgctacatgcaacggcggccctccaatgactgccgcaactaccggcccccaagactggcctccgccttcggagacccacactttgtgaccttcgacggcaccaacttcacattcaatgggcgcggagagtacgtgctgctggaggcagcgctgaccgacctgagggtgcaggcgcgggcccagcccgggacgatgtccaacggcacggagacccgtggcactgggctgaccgcagtggccgtccaggagggcaactcagatgtggtggaagtcaggctggccaacaggaccggaggtctggaggtgctgctgaaccaggaggtgctgagcttcaccgagcagagctggatggacctgaaaggaatgttcctgtcggtggctgccggggacagggtctccatcatgctggcatcaggggccggcctggaggtcagcgtgcagggcccgttcctgagtgtgtccgtcctgctgcctgagaagttcctcacccacacccacggcctcctcgggacactcaacaacgaccccaccgacgacttcaccctgcacagcgggcgcgtcctgcccccaggcaccagtccccaggagctgttcctgtttggggccaactggaccgtgcacaatgcgtcctccctgctcacctacgattcctggttcctggtccacaacttcctgtaccaacccaagcacgaccccaccttcgagcccctcttccccagtgagaccaccctcaaccccagcctggcacaagaggcagccaaactatgtggggacgatcatttctgcaactttgatgtggcagccactgggagcctgagcacgggcactgccactcgggtggcccaccagctgcaccagcgtcgcatgcagagcctgcagccagtggtgtcctgtggctggctggccccacctcccaacggacaaaaggagggcaacaggtacctggcgggttccaccatctacttccactgtgacaacggctacagcctggccggggcagagaccagcacctgccaggctgacggcacctggtcctcacccaccccgaagtgccagccaggacgcagctacgcggtgctgttgggcatcatctttgggggcctcgcggtggtggcggcggttgcgctcgtctatgtgctgctgcgccgcaggaagggcaacacgcacgtctggggtgcacagccctgatgggagcagcttggctgtgagcaccaggccaagactcctgagaacaggcagcccagtcctgcgactcccgcatccccaggaccagacacctgggacctggatacttgatacctgggcatttaaccccctactctgtcatctcagaccccaggcaggaggcccagtgttccaacacccaagccccgtgctagcagcgctccgtgctcttccccaaatactcacggctctaattccccaaacctgaaacttcataccctgggattctaatacctatgtcctgagccctgacactcccacacctgagcctcagattccaatagctcactccctagagcctgacgccggggcccctgacccctgagcctcagattccaatacctcactccccagagcctgatgccggggcccctgacccctgatctacggaggcctgctcccggaccgtgcgggcaccagtgcagtgctgccttggttcctggacccctgggcccatcctgggaccccagatggggtaaggagaggccccagaaccccaaagcagacagcgagacccccagcggcagaggcctccctcggcactccaggcttataatttcgaactcttctggaaggtcactcaggaacaccctccctgcctgtgcaaagagaaaacaagcgccttgtttccttc

SEQ ID NO: 281 - DNA, 2193 bp, Homo sapiens
gctgggccggagccggagcccaagccagagcggcgcggcctggaagaggccagggcccgggggaggcggcggcagcggcggcggctggggcagcccgggcagcccgagccccgcagcctgggcctgtgctcggcgccatgagcggcggcgggccttcgggaggcggccctgggggctcgggcagggcgcggactagctcgttcgcggagcccggcggcggaggcggaggaggcggcggcggccccggaggctcggcctccggcccaggcggcaccggcggcggaaaggcatctgtcggggccatgggtgggggcgtcggggcctcgagctccgggggtggacccggcggcagcggcggaggaggcagcggaggccccggcgcaggcactagcttcccgccgcccggggtgaagctgggccgtgacagcgggaaggtgaccacagtcgtagccactctaggccaaggcccagagcgctcccaagaagtggcttacacggacatcaaagtgattggcaatggctcatttggggtcgtgtaccaggcacggctggcagagaccagggaactagtcgccatcaagaaggttctccaggacaagaggttcaagaaccgagagctgcagatcatgcgtaagctggaccactgcaatattgtgaggctgagatactttttctactccagtggcgagaagaaagacgagctttacctaaatctggtgctggaatatgtgcccgagacagtgtaccgggtggcccgccacttcaccaaggccaagttgaccatccctatcctctatgtcaaggtgtacatgtaccagctcttccgcagcttggcctacatccactcccagggcgtgtgtcaccgcgacatcaagccccagaacctgctggtggaccctgacactgctgtcctcaagctctgcgattttggcagtgcaaagcagttggtccgaggggagcccaatgtctcctacatctgttctcgctactaccgggccccagagctcatctttggagccactgattacacctcatccatcgatgtttggtcagctggctgtgtactggcagagctcctcttgggccagcccatcttccctggggacagtggggtggaccagctggtggagatcatcaaggtgctgggaacaccaacccgggaacaaatccgagagatgaaccccaactacacggagttcaagttccctcagattaaagctcacccctggacaaaggtgttcaaatctcgaacgccgccagaggccatcgcgctctgctctagcctgctggagtacaccccatcctcaaggctctccccactagaggcctgtgcgcacagcttctttgatgaactgcgatgtctgggaacccagctgcctaacaaccgcccacttccccctctcttcaacttcagtgctggtgaactctccatccaaccgtctctcaacgccattctcatccctcctcacttgaggtccccagcgggcactaccaccctcaccccgtcctcacaagctttaactgagactccgaccagctcagactggcagtcgaccgatgccacacctaccctcactaactcctcctgagggccccaccaagcacccttccacttccatctgggagccccaagaggggctgggaaggggggccatagcccatcaagctcctgccctggctgggcccctagactagagggcagaggtaaatgagtccctgtccccacctccagtccctccctcaccagcctcacccctgtggtgggctttttaagaggattttaactggttgtggggagggaagagaaggacagggtgttggggggatgaggacctcctacccccttggccccctcccctcccccagacctccacctcctccagaccccctcccctcctgtgtcccttgtaaatagaaccagcccagcccgtctcctcttcccttccctggcccccgggtgtaaatagattgttataatttttttcttaaagaaaacgtcgattcgcaccgtccaacctggccccgcccctcctacagctgtaactcccctcctgtcctctgcccccaaggtctactccctcctcaccccaccctggagggccaggggagtggagagagctcctgatgtcttagtttccacagtaaggtttgcctgtgtacagacctccgttcaataaattattggcatgaaaa

SEQ ID NO: 282 - DNA, 7177 bp, Homo sapiens
gcttttagtttctcttctttctaaagaaggctcgcggagcccggctggagaacctcaccctcgccgagcctagaaccgagagggggccaccccaggcggtcaccagcagatttgcccgcgcgttctctttctttccacccagttgcccttgcggccggctgtaaacctgccactaggacccggtcggtgagatctagcctcttgacctgagagccgagagtggatcgctgggctgggctaacggcgacggagagcgcgccctcgctgactccgggcgcgcccagcagtagcaccgcccgcgcccgcccctggacacttgtaagtttcgatttccgatttccgcggaaccgagtcccgcgccgcggcagagccagcacagccagcgcgccatggcggacccggaggtgtgctgcttcatcaccaaaatcctgtgcgcccacgggggccgcatggccctggacgcgctgctccaggagatcgcgctgtctgagccgcagctctgtgaggtgctgcaggtggccgggcccgaccgctttgtggtgttggagaccggcggcgaggccgggatcacccgatcggtggtggccaccactcgagcccgggtctgccgtcgcaagtactgccagagaccctgcgataacctgcatctctgcaaactcaacttgctgggccggtgcaactattcgcagtccgagcggaatttatgcaaatattctcatgaggttctctcagaagagaacttcaaagtcctgaaaaatcacgaactctctggactgaacaaagaggaattagcagtgctcctcctccaaagtgatcctttttttatgcccgagatatgcaaaagttataagggagagggtcggcagcagatttgtaaccagcagccaccgtgttcaagactccacatctgtgaccacttcacccgagggaactgtcgttttcccaactgcctccggtcccataacctgatggacagaaaggtgctggccatcatgagggagcacgggctgaaccccgacgtggtccagaacatccaggacatctgcaacagcaagcacatgcagaagaatcccccagggcccagagctccttcttcacatcgtagaaacatggcatatagggctagaagcaagagtagagatcggttctttcagggcagccaagaatttcttgcgtctgcttcagcgtctgctgagaggtcctgcacacctagtccagatcagatcagccacagggcttccctggaggacgcgcctgtggacgatctcacccgcaagttcacgtatctggggagtcaggatcgcgctcggcctccctcaggctcgtccaaggctactgatcttggaggaacaagtcaggccgggacaagccagaggtttttagagaacggcagtcaagaggacctcttgcatggaaatccaggcagcacttaccttgcttccaattcaacatcagcccccaactggaagagcctcacatcctggacgaatgaccaaggcgccaggagaaagactgtgttttctcccacgctacctgccgcccgctcttctcttggctctctgcaaacacctgaagctgtgaccaccagaaagggcacaggcttgctttcctcagactacaggatcatcaatggcaaaagtggaactcaggacatccagcctggccctctttttaataataatgctgatggagtggccacagatataacttctaccagatccttaaattacaaaagcactagcagcggtcacagagaaatatcatcacctaggattcaggatgctggacctgcttcccgagatgtccaggccactggcagaatcgcagatgatgctgacccaagagtagcacttgttaacgattctttatctgatgtcacaagtaccacatcttctagggtggatgatcatgactcagaggaaatttgtcttgaccatctgtgtaagggttgtccgcttaatggtagctgcagcaaagtccacttccatctgccttaccggtggcagatgcttattggtaaaacctggacggactttgagcacatggagacgatcgagaaaggctactgtaaccccggaatccacctctgttctgtaggaagttatacaatcaattttcgggtaatgagttgtgattcctttcccatccgacgcctctccactccttcttctgtcaccaagccagccaattctgtcttcaccaccaaatggatttggtattggaagaatgaatctggcacatggattcagtatggagaagagaaagacaaacggaaaaattcaaacgtcgactcttcatacctggagtctctctatcaatcctgtccgaggggagttgtgccatttcaggcgggctcacggaactatgagctgagtttccaagggatgattcagacaaacatagcttccaaaactcaaaaggatgtcatcagaagaccaacatttgtgcctcagtggtatgtgcagcagatgaagagagggccagaccatcagccagcaaagacctcgtcagtgtctttaactgcgacctttcgtcctcaggaggacttttgcttcctatcctcaaagaaatataagttgtcagagatccatcacctacatccagaatatgtcagagtaagtgagcattttaaagcttccatgaaaaatttcaagattgaaaagataaagaagatcgagaactcagagctcctggataaatttacatggaagaaatcgcagatgaaggaagaaggaaaactcctattttatgcgacaagccgtgcctatgtggaatctatctgttcgaataattttgacagtttcctacatgaaactcatgaaaacaaatacggaaaaggaatttactttgcaaaagatgccatctattcccacaaaaattgcccgtatgatgccaaaaacgtcgttatgtttgtagcccaagttctggttggaaagtttactgaaggaaatataacgtacacgagccctcctccacagttcgacagctgtgtggataccagatcgaatccctccgtttttgtcatctttcagaaagatcaggtttacccacaatatgtgattgaatatactgaagacaaagcctgcgtgattagttagaaccgatgaatacagcgtcagaaggatgccataaccattctgttcctttacagaactaaattgccgcagacaggagttaaagttttatattttcctgctcagttatctaatgtcttagatcagtggtccccaaattttgctacatattagaatcatctgggaggttttaaacaaattctgatgcccaggttgcaccccatgccaatgaaatcatttctgggcgtcagcgccaggcagttgtatttttttttttttttttttttttgagactgaatctcactccatcgtccaggctggagtgcagtggcgcgatctcggctcactgcaacctctgcctcccgggttcaagcaattctcctgcctcagcctcccgagtagctggaactacaggcacacactgccgcgcccagctaattttttgtattttttagtagagacagggtttcactgtgttgcccaggctggtctcaaactcctgagctcaggcaatctgcccgccttggcctcccaaagtgctaggattacaggtatgagccaccatgcccggctggcagttgtattttttaaagcccttctgatgattccaatgtgttggaaagtttaccttgtctcagatgtaactggtaaaggctgatttctaaattttctgtaattgcagcaacctttctctcctgtctacccttttagtttactgtatgccatggttttgttttggttacattgaaagaaagttaatttggaaaatttgggagaaatctaatcatgcctattaaggatgtaagacattacagccttagaagaaagattgtgaaaagctggggagaaaatgcttaaggacatgctaggggaaaaaaaagtaaaattgaagtgctattgcagacatggctgcagtactgtaccttatcattctgatgaaactgatttggagcacccttttctttatcgctacatttatttaggggacaaactccatccaggttgactctctctggaatgcggtaataagagctggcaagtaaggctcagagagaagcaaccaactggagttaattgcccatttgggctctttgtataattatggcaaagtagacatttatgttctaattaatatgattacagagaaggctttttctcaggtcaggcttttcatgaaagtattttgagaacaatgaattgcaataaccagcttcacacaagcataactgataaacgcgagtgctattgtagtcttggcaagtgagccaagaacctaggagcagggccattcctactgaaggacgggccccctacggagatgaaatttgtttcctggtgagcacagaatcagaacaaagaacaatatcccaaagaggccctgtgtctaccaggagcttctttttccaaatgtaatggattatgtggaattgtagtgccatcggtttttacttagagcccttgacgtgcttggaccaatatttccttccttcttatgaaccaggtttttccttctgattttcccttttcaacattccttaccagtcaccaaagtttcctgttataatttcttttagcagacaagttataagtcagatttaattagcatcagagttgattttatattagtcagattttggatcatcacagagatctccacaactccttggcttaaacagctccaccggtaaaaaaaaaaaaaaaaaaaaaaaaaaaaaatagtttttttagagtagagttattttctgggagagttactacaaatgcttattctcattgacttatttctttcatggtaactttcgttttggagtgttcattttctgaacttgaccctcacattgtaggggtgcagtttgtccaactctttccaacagcccattagacaccactagctggatatttcacaggcatctttgattcaatatgtccaaagtggaactctccatctacctccctcacatgaacctgttcctctctcaggatctgtatgtaagtgaaaagcatcaccatctacccattggctcaagcagaaatctggaagtcatctttgactccttcctctccctcctgataaacatctaagcagtttctaagtctagttttacctcttaaatatctctgttcccttctaagttgtttgctgtgttttcttcagagcaagaaggttatattttttaaaatttacttagtaatgcacattcaaaacacacatcaagtcttcaggataaagttcaaaaccgctgtcatggccccatgtgatctctccctcccctacccctctatcatttagtttcttctgcgcaagccactctggcttcctttcagttttgtggttcccatttttagctagttcagtggttttcaatgggcatttctgcctttttttttctaaacgacaaatagaaatacatcttctttattatcctccaaatccaattcagaggtaatatgctccacctacacacaattttagaaataaattaaaaattaaataaaactaatatgaacataaagaggaaataaaaggtacctaacttgggcacagctgtaactgaagacctaatgaagtagtcagatgcttacaactatttataatgcatcaatttgaacttagaaggtaggagatcagatcatatgtgggaaaatgtaaaagcagggatatcagtgggcattagaataaaaactagggatacaataacttctttgcatatgacaatacttatttgtatataagagaaagaacgaaataacctttattgaaataaagatactatgcaagaaaatgtacagttgtcgaagtggagaaaatgaggatatattcttgcagacgagctataggtcatacatgaatgtctagtgagacattcaaaattcgtatagggtgcagagtaatttcttattgtgaggaactgtccaatgtattgcaagatgttctgcatacttggctctcacatactaaatgctagtagcgcccccacccccacgcccagtcacggtgacaaccacaaaccctatcagatctattcacctttttcagagcagatattttgtaacattctctttgctgacctgaaatgactcatagataatacaatctacttacacacatgaatttcttaaaaaaatcaatttaatgccctaactctcttattaaggagaaatagaaaagaagaaatttataatgaaaagaagatgaatttcattatgtaaacgctcaggcatgactacgctgtttgaaacagacagatgtttactcttccttgtaatgagtaggtttggatttaagagccgattagaggctacttcctgtaaacaagtacaggaaaatgaaactagacgggtgggggacactagaatgaaaaccagtgttagggtaaagacaaaacagactatgtacataatctgtatatgggaaaagaaagagcgaaattaccttacttaaggataataggacaagacaaattacagattgtctcagagaaaacaaatgagttactctctcggacaagctgtaggtcctacctaaatgtccagcaggacattagacagtcgtacagggtacagaataattcttcgttgtgtggcactaacccacacactgcaggacatcgttctccctggctgcatccactcagtgctgggagtagtccccagttattatgaaaccaccaataacccactgaccacagtgagaaccactgattttttccactgacctactgaatatctagcatccttagattggctcaactgttactttcctaaggagtccttctacagaataggtcagatcttggcctcccaaaccccttatttttaaaatactttgcgccttgctttgataatttgtattatgtatccaaactgaaattatctgctttctgcattagaatgtaagccccctgagggttgagtcagtctgtcttgtttgctgtgccacgcctgatgcccagcccagcagcatgctttgtacactgatatattgggtaaattttgttgaataaattaagctcaactatttgtatttcaatagttgagttgtattgcttcctgttcttcaagcttaatttgaactgtctaataaaaagaagtaattaatttgg

SEQ ID NO: 283 - DNA, 3107 bp, Homo sapiens
agttggagccagacagcggggtggacaagtggcgtgtgtgctgcgaccccgagggaagatgaacgggacgcggaactggtgtaccctggtggacgtgcacccagaggaccaggcggcgggcagcgtggacattctcaggctgactctccagggtgaactgacaggagatgaacttgaacacatagcccagaaggcgggcaggaagacctatgccatggtgtccagccactcagctggtcattctctggcttcagaactggtggagtcccatgatggacatgaggagatcattaaggtgtacttgaaggggaggtctggagacaagatgattcacgagaagaatattaaccagctgaagagtgaggtccagtacatccaggaggccaggaactgcctacagaagctccgggaggatataagtagcaagcttgacaggaacctaggagattctctccatcgacaggagatacaggtggtgctagaaaagccaaatggctttagtcagagtcccacagccctgtacagcagcccacctgaggtggacacctgtataaatgaggatgttgagagcttgaggaagacggtgcaggacttgctggccaagcttcaggaggccaagcggcaacaccagtcagactgtgtggcttttgaggtcacactcagccggtaccagagggaagcagaacaaagtaatgtggcccttcagagagaggaggacagagtggagcagaaagaggcagaagtcggagagctgcagaggcgcttgctagggatggagacggagcatcaggccttactggcgaaagtgagggaaggggaggtggccctagaggaacttcggagcaacaatgctgactgccaagcagaacgagaaaaggctgctaccctggaaaaggaagtggccgggttgcgggagaagatccaccacttggatgacatgctcaagagccagcagcggaaagtccggcaaatgatagagcagctccagaattcaaaagctgtgatccagtcaaaggacgccaccatccaggagctcaaggagaaaatcgcctatctggaggcagagaatttagagatgcatgaccggatggaacacctgatagaaaaacaaatcagtcatggcaacttcagcacccaggcccgggccaagacagagaacccgggcagtattaggatatccaagccgcctagcccgaagcccatgcctgtcatccgagtggtggaaacctgagctgcctggagatggttgctgccattgctgctgcctctgcctcggagaagcccactgcccctgttggctgttaacactgcctttgacttcctgactgtcccctggctgcacccaggacttcgggctcctgtgtctcaccattcccaagcccctggccactctaagctgggcagacggagcacgagcacctattcaaggcactgcagccctttggaagacattgtcctgcaagcaggagccagggcaatatctatattcctacagtgactatttttctctgtagagagcctcccttctgttgtagactggactctggctgtgccataagccaggccttcatcagattgggagaggtgacaagatttgcctcagccctaaaagctggagacacagatgtccagagtgattggagaatgtcctgggggaatgaagttccttccacaaacacagctcagttcttagcaacaaactgtttgtttttctacttgctccatctgcagcctacgctgccctggcctcctgcagacagatagtggggttacctggcaaggcctggtgagagccagtgaacctaagctttgactgggtggccttgtctttctggggaggagggaatgtacattcagggagtagccttttgcggaaaaattctctagggctacagacagtcatgtgtgacttctctctgctgtgaaaactcccagagtctctttagggattttccctaaggtgtaccaccaggcacacctcagtcttcttgacccagagcctgaaaactgttttcactgggttccaccagtcccagcaaaatcctctttgtatttattttgctaagttattggtggttttgcttacatctcatgattgatataataccaaagttctatagccttctcttgcagtatttggatttgcttgaaaccgggaaaactgttcccattaggcttgttaatgtcagagtgacactattatgaatctttctctccctttcctctgcctgtttcttctctctttctccttcaaacttgctctgcagctaaggaaggtgagtctactttccctgaggctttggggtcagagtatatgttgtttggagaaagagggcaatcaggactcttctgggacccagatgagttcttcactagcccttctgaaccccttgctccataattggtcttttatcctggctctgaatgaccctgcaggtcatcatggttttctttttttattgtttttttttttttctgagacagagtctcactctgtcacccaggctggagtgcagtggcgcgatctcagctcactgcaacctctgcctcccggatttaagcgattcttctgcctcagcctcccgagtagctgggactacaggtgtgccaccacgcctggctgatttttgtatttttagtagagatggggtttcaccatactggctaggctggtctcgaattcctgacctcaggtgatccacccacctcggcttcccaaagtgctaggattataggcttgagctactgcgcccggcccatggtgtttttctttagggctcttcctacaaccttgagaagtagataggcatcagagtatggtactataggaatcagaaaaattcaaaacaaatgtggattaagtgtttaggctctatgtggctcacgcagccagaatccttaagtctgtgtgtttctgtgtctcaagactgggctcacattctggctttgtccataacaatgctctgggatttcagggagttccctcatttgtaaaatgagggggtcagagcaggtgatatccatgtttcttccctttctgatattgttgtctgtggcatattctttgtatggcgaatttaataaattatattaatgtgtctctttga

SEQ ID NO: 284 - DNA, 3374 bp, Homo sapiens
agtgcctccctccagactcgggagggtcgagggggcgcgggagagagcgcgggcggccgccggggctggtcgcctgcagggatgggggacgagcggccccactactacgggaaacacggaacgccacagaagtatgatcccactttcaaaggacccatttacaataggggctgcacggatatcatatgctgtgtgttcctgctcctggccattgtgggctacgtggctgtaggcatcatagcctggactcatggagaccctcgaaaggtgatctaccccactgacagccggggcgagttctgcgggcagaagggcacaaaaaacgagaacaaaccctatctgttttatttcaacattgtgaaatgtgccagccccctggttctgctggaattccaatgtcccactccccagatctgcgtggaaaaatgccccgaccgctacctcacgtacctgaatgctcgcagctcccgggactttgagtactataagcagttctgtgttcctggcttcaagaacaataaaggagtggctgaggtgcttcaagatggtgactgccctgctgtcctcatccccagcaaacccttggcccggagatgcttccccgctatccacgcctacaagggtgtcctgatggtgggcaatgagacgacctatgaggatgggcatggctcccggaaaaacatcacagacctggtggagggcgccaagaaagccaatggagtcctagaggcgcggcaactcgccatgcgcatatttgaagattacaccgtctcttggtactggattatcataggcctggtcattgccatggcgatgagcctcctgttcatcatcctgcttcgcttcctggctggtattatggtctgggtgatgatcatcatggtgattctggtgctgggctacggaatatttcactgctacatggagtactcccgactgcgtggtgaggccggctctgatgtctctttggtggacctcggctttcagacggatttccgggtgtacctgcacttacggcagacctggttggcctttatgatcattctgagtatccttgaagtcattatcatcttgctgctcatctttctccggaagagaattctcatcgcgattgcactcatcaaagaagccagcagggctgtgggatacgtcatgtgctccttgctctacccactggtcaccttcttcttgctgtgcctctgcatcgcctactgggccagcactgctgtcttcctgtccacttccaacgaagcggtctataagatctttgatgacagcccctgcccatttactgcgaaaacctgcaacccagagaccttcccctcctccaatgagtcccgccaatgccccaatgcccgttgccagttcgccttctacggtggtgagtcgggctaccaccgggccctgctgggcctgcagatcttcaatgccttcatgttcttctggttggccaacttcgtgctggcgctgggccaggtcacgctggccggggcctttgcctcctactactgggccctgcgcaagccggacgacctgccggccttcccgctcttctctgcctttggccgggcgctcaggtaccacacaggctccctggcctttggcgcgctcatcctggccattgtgcagatcatccgtgtgatactcgagtacctggatcagcggctgaaagctgcagagaacaagtttgccaagtgcctcatgacctgtctcaaatgctgcttctggtgcctggagaagttcatcaaattccttaataggaatgcctacatcatgattgccatctacggcaccaatttctgcacctcggccaggaatgccttcttcctgctcatgagaaacatcatcagagtggctgtcctggataaagttactgacttcctcttcctgttgggcaaacttctgatcgttggtagtgtggggatcctggctttcttcttcttcacccaccgtatcaggatcgtgcaggatacagcaccacccctcaattattactgggttcctatactgacggtgatcgttggctcctacttgattgcacacggtttcttcagcgtctatggcatgtgtgtggacacgctgttcctctgcttcttggaggacctggagaggaatgacggctcggccgagaggccttacttcatgtcttccaccctcaagaaactcttgaacaagaccaacaagaaggcagcggagtcctgaaggccccgtgctccccacctctcaaggagtctcatgccgcagggtgctcagtagctgggtctgttcccccagccccttgggctcacctgaagtcctatcactgccgctctgcccctccccatgagccagatcccaccagtttctggacgtggagagtctggggcatctccttcttatgccaaggggcgcttggagttttcatggctgcccctccagactgcgagaaacaagtaaaaacccattggggcctcttgatgtctgggatggcacgtggcccgacctccacaagctccctcatgcttcctgtcccccgcttacacgacaacgggccagaccacaggaaggacggtgtttgtgtctgagggagctgctggccacagtgaacacccacgtttattcctgcctgctccggccaggactgaaccccttctccacacctgaacagttggctcaagggccaccagaagcatttctttattattattattttttaacctggacatgcattaaagggtctattagctttctttccgtctgtctcaacagctgagatggggccgccaaggagtgccttccttttgctccctcctagctgggagtgacgggtgggagtgtgtgtgcccaggtgggggtgtctcctggctgggaaggagggaaagggagggagagttttgcgggggttggcagtggagagcaggctggagaggagatggctaatagctgtttaatggaaacctgctgggctggagggagttaggctgaatttcccgacttcctctgccagttattgacacagctctctttgtaagagaggaaagaaactaaacccacccaagggatgatgtcagggggagaggtggagggcagatgtcctgggcaaaccgggcccctctgcccacacacctcacttgatccttttgccaaacttgtcaaactcaggggaactggcttcccagttgcccctttgccatattccaagtccccctcagacttcatgtctctgctcatcagcactgtcccaggatcctggagagggagaactcctggccccaggggaaagaggggggggtctcccgtttcctgtgcctgcaccagccctgcccccattgcgtctgcacacccctgcgtgtaactgcattccaaccactaataaagtgcctattgtacaggtc

SEQ ID NO: 285 - DNA, 1559 bp, Homo sapiens
acagcagtccgtgccgccgtcccgcccgccagcgccccagcgaggaagcagcgcgcagcccgcggcccagcgcacccgcagcagcgcccgcagctcgtccgcgccatgttccaggcggccgagcgcccccaggagtgggccatggagggcccccgcgacgggctgaagaaggagcggctactggacgaccgccacgacagcggcctggactccatgaaagacgaggagtacgagcagatggtcaaggagctgcaggagatccgcctcgagccgcaggaggtgccgcgcggctcggagccctggaagcagcagctcaccgaggacggggactcgttcctgcacttggccatcatccatgaagaaaaggcactgaccatggaagtgatccgccaggtgaagggagacctggccttcctcaacttccagaacaacctgcagcagactccactccacttggctgtgatcaccaaccagccagaaattgctgaggcacttctgggagctggctgtgatcctgagctccgagactttcgaggaaatacccccctacaccttgcctgtgagcagggctgcctggccagcgtgggagtcctgactcagtcctgcaccaccccgcacctccactccatcctgaaggctaccaactacaatggccacacgtgtctacacttagcctctatccatggctacctgggcatcgtggagcttttggtgtccttgggtgctgatgtcaatgctcaggagccctgtaatggccggactgcccttcacctcgcagtggacctgcaaaatcctgacctggtgtcactcctgttgaagtgtggggctgatgtcaacagagttacctaccagggctattctccctaccagctcacctggggccgcccaagcacccggatacagcagcagctgggccagctgacactagaaaaccttcagatgctgccagagagtgaggatgaggagagctatgacacagagtcagagttcacggagttcacagaggacgagctgccctatgatgactgtgtgtttggaggccagcgtctgacgttatgagcgcaaaggggctgaaagaacatggacttgtatatttgtacaaaaaaaaagttttatttttctaaaaaaagaaaaaagaagaaaaaatttaaagggtgtacttatatccacactgcacactgcctggcccaaaacgtcttattgtggtaggatcagccctcattttgttgcttttgtgaactttttgtaggggacgagaaagatcattgaaattctgagaaaacttcttttaaacctcacctttgtggggtttttggagaaggttatcaaaaatttcatggaaggaccacattttatatttattgtgcttcgagtgactgaccccagtggtatcctgtgacatgtaacagccaggagtgttaagcgttcagtgatgtggggtgaaaagttactacctgtcaaggtttgtgttaccctcctgtaaatggtgtacataatgtattgttggtaattattttggtacttttatgatgtatatttattaaacagatttttacaaa

SEQ ID NO: 286 - DNA, 7934 bp, Homo sapiens
attgattaggagattatatggagctgcgggagctgccgcctgggggaagagaggtgcagcttctgctaggtttgtgctctcctcccagggtctccttggcttccttccccaaagcagctcagagctggtatgaggtgagggtggggggcagccggccagcctggctgttgacggcaactccagggcttgtttcgcgcagccttgccagcattacccatcctcatcagaaactggcagcggcagccacagctcgggcaggcggctccagccccaggctggatttgcagaatctgtcctttgcctccaagcccagctttcagctgggagagggggaagaaggggcagtggcagcagttcttctggctctttctccctttctctctttctctttctgtgttcaagtcacattacatgggattctgttcttttgggacttcgtcatcttttccaatatgtcctgggacctccggagctgtaacggggatgctaaggacacggtcagtggattatcgtgactgtactaatgaaaggattcaagctctcctgcactgccagtaactccaaccgcagcacgccggcctgctcgcccatcctccggaagcggtctcgctcgccaaccccgcagaaccaggacggagacaccatggtggagaagggctcagatcactcctcggacaagtccccgtccacaccggagcagggcgtgcagcgcagctgctcctcccagtccggccggagcggcggcaagaattccaagaaaagccagagttggtataatgtgttaagccccacctacaagcagagaaatgaagacttcagaaagctctttaagcagcttccagacacggagcgcctcattgttgattactcatgtgcactccaaagagacattctccttcagggccgactctacctctctgaaaattggatctgcttctacagcaacatcttccgctgggaaactctgctgacagtccgtttgaaagacatctgttccatgactaaagaaaaaacagctcgcctcattcccaatgccatccaagtttgcactgattcagaaaagcacttcttcacttcgtttggggcccgggataggacatatatgatgatgttccggctctggcagaatgctctccttgaaaagcctctgtgtcccaaggagctctggcactttgttcaccagtgctatgggaacgaattgggcctgaccagtgatgacgaggactacgtgccccctgacgacgacttcaacacaatgggatactgtgaagagatccctgtggaagagaatgaagtgaatgacagctcatccaagagcagcatagagaccaagccagatgccagtccacagctgcccaagaaatccatcaccaacagcacactaacatccacagggagcagtgaggcccccgtctcgtttgatgggctgcccctggaggaagaggcgctggagggagacgggtccctggaaaaggagctcgccattgacaacatcatgggggagaagattgagatgatcgctcctgtgaactccccttcactggacttcaatgacaatgaggacatccccactgagctcagtgactcttccgacacacacgatgaaggagaggtccaggccttctatgaggacctgagtggccggcagtacgtgaatgaagtcttcaacttcagcgtggacaagctctatgacctcctcttcaccaactcgcccttccagcgggatttcatggagcagcggcgcttctctgatatcatcttccatccatggaaaaaggaggagaatggaaaccagagccgagtgattctttacaccatcacccttaccaaccctctggctcccaaaactgccactgtcagggagacacagaccatgtacaaggcgagccaggagagtgaatgttacgtgatagatgccgaagtcctcacccacgacgtgccctaccatgactacttctacacaatcaatcgctacacgctcacccgtgtggctcggaacaagagccgactcagggtctccacagagctgcgctatcgaaaacagccctgggggttagtgaaaacgttcatcgagaagaacttctggagtgggctggaggactacttccgccatttagagagcgagctggccaaaacggagagcacttatttggctgagatgcacagacaatctcccaaagagaaggccagcaagactacaacggtgcggaggaggaagcgtccccatgcccacctgcgagtccctcacctggaagaggtgatgagcccggtcaccacgcccacagatgaggatgtgggccacaggatcaaacatgtggcaggttccacacagacgcggcatatcccggaggacacccccaacggtttccacctgcagagcgtgtccaagctgctgctggttatcagctgtgtgatctgtttcagtctggtgctgctggtcatccttaacatgatgctcttctacaaactctggatgttggaatacaccacgcagaccctcactgcctggcagggtctaaggctccaagaaaggttaccccagtctcagacagaatgggcccagctcttagagtcccaacaaaagtaccacgatactgagctccaaaaatggagggaaatcatcaaatcctcagtgatgctccttgaccagatgaaggactcgctcatcaaccttcagaacggcatcaggtcccgcgactacacgtcggaaagtgaagaaaagaggaatcgctatcattgacaaggcaggaacagggtggctgcaagaggcctgtgcaatacatgtacatagaccatataaatatatatatataaatatatatatatacagaatataaatatatatattatatacagattttaaaaaagagataatgcctatgtaccagggagaaggagcgggccctcccgcgccctgtgctggccggagcagcgttttcttatggtggagcagctgaggagggcaggaaccgcctctcagcaccgacctcccctgatctccctcctcccaccctctgttccccaccccttcccttgctggccattcttggcttttagaagggaaatgttgagccaaagttatgcctgcgaagaccctaaggtctcaaaaagaagtcttaagacggcattgcttaaggtgcttcattccctaatccccttttgatttgtttccaaaataaaagagaatcttttcttccctaccccaggcttccccaggcattctcttgggaacacagaagcatcaagggagcccagtctaaactcctagggttggccgcccacttgatccagaccgtactgagtgtcagatggagaggatgcttggaaagctaggaaggctgcattgtgtggtggcaggctcccgagactcgtgttctgaaggatactctcctccatcacccctgcaccttcctccgacctgtgtagggtgtggacccagtaagggctgggaatttcttactttcccacccgctttctctctggtcttctcccaggctggatctgggcgaagtgtcactttttagtgcctaaagtcctattgtttctctgtgccctaagagcacattgtttattagccagggtggagcgttttcgaccttattaaacctcttttagtgcttctaagcaagtcaggtctgtggctctgaggccttcacttagagctgtcagtgtgatttccaggatgagtcagggtgtgctgggccctccaggatttgagagagggagagaaggcccttgccacgtccggggtgcagggtctacccacagaacactgtgagtggtgagcaccaagatgggttgccagcctcatttgctctttgaacgaaccaacattagccagtggagacgactgtctgagacagtttgcacatagaaaaagcatctgagccactggagggaaggatttggcaaaggtgcatgtgtttgggcaggaaaaggccaagtgaaatctatgccctacgggagccattcccaatcctgagtttctcagacttggcaatgggggttctggcgggggttggagtacaaatcctgctctggtctctggccccacagaggtgtaagatcattaagaagtagaaggcactagcttcaaagagtgagacattcagggccttttcagcattggcccactagcaccatgcatttatctgaattcacggggccctctgggcacattcatcatccctcatacactaactactgtttcttcatgtaatgaccaaaagagtcccaccagctccaggcagagcttgtggagattcatgaaagagtcatagccagtttggcatgcagaggtcttcagtcttgcttattcttctcctgggcttcttgacacaggggcagaagaaaccccagatgtcccagatgtcccagaacatcagcccaaaagacagaagattttatcactcatctaccccaaagataaagttgtatttttttcttagaatggcctttaattccctgtggcaattacagtttttgacttttccatgtgagaataaggccttggtatttccctaagggcaggatcagaaaacaggaaggtccatgcccaggtgatcctccaagggaggagggtgaggaggctccagggcatgagctagagtggatattcctcccctagaagaggagatgggaggaaatgcagtttcatgtaatccctgtgaagagtgcctatgcccacagcccagtgggtccttgttcagttcttgtccaggcctttgggtgagggacactggtagggatcaaggctcatgggctctgagccaaagaaggaggcatggtgcagactgctggaaatctcccccttggcacagccagaagccaaaactattcccagaaagttttgaatgcaaaacttgtagattcctgaatttattccatacataattatttccttaagttatttaattattaaaggtgccacggtgggacctttgggatgacttaaaaagggttctttgttgggagtcaagtgacagagcagacctggccgcagggagttgttctgcttctgctttacctctcaggaccattcccaggaggaaaaggtggcagagagggcagtactgagtatgtcagaagagccctcctggttttttagcgatttgaacccactagacaatgtgtgcacatagggaatgtcctttaagaatcatggatctcttgtaggctctctgtgttccaataattttttgactatcataccaggaaaaaaccaacaactctattcattcccaaacaaaatctcttcccccttagtcaatagcttgcgaaagacatcttaactcacccttgcagataagtcttggagtgaaacaaataaatagcattgtattcctggccatttgcctggctagttgctgtctacaagggagcatcaaaacatcactacttcttatgtaacttcttccagccagtgcttttattgttcgttttagtttactggggacacacaggagtctttctgtaatgacttatgtggtaaaatgtttgagagtttgcactcaattttaaagaatttgcagtttctaacaaggtgaagaacagctataggatctaaagttccattacagcttactgtgaaagaattgacaagactggcctcagacaagctaatcatggtgcgactctctcccttcctcatccacctctttggggacaagaggattacatctcaggccagcaagatcagctgcttgaagctctgtgtaagagcactgcactgacggtttggagacctgagcctgggtcctgacttttccattgactaagctctgtggccttgggcaagtcactccccctctctgagcttcagtatcctcctgtcacaggagggagttgggctagatcatctttaaggtaggttctagctttgacatcatcttgggggttaggccagaggctgggaagactgggtggactttctcaattgctctgccaggagggaacaagcccagaggctgaagcttcccagtatttagaggtgtggtagggcagtgtctgcattcccaggagacccagggtgattaaaatttattctttaggtggctaggagggctggggaggcccagtggaagagagagagagagagagagagagagagagagagagagagagagatcgagcttgatgtattgctcagtattcacttagaagggtttctttctctttggcctagtttgtgaagggatcttcctttggactttctctaagttgggagaagaacattcttttcaatggagctcatcttctatctctagggtctgttcagcctttcatctatccatccttcctctttattggtagaagaaacagtggagagtagccacttctggttctagcacttctcttttgttaagatagggtttggatttagtatgaagctttggctaaaacccttgggtttgccttagaacactgacactaagaacctggaatgacatggggaggacaaagagagctcaagaggaatgctttgtgagaagtggattctctccgtgtccctgccccccacccaaacttgaactatacctattacatttccaggcagtatccctaagatgagatcctggagaaaggactaggggaagtatctttctggatgcttgtggtcccagaagggtactttctgtgtcataccatgccacttctttaagctcttcagggcagccaaagccagcccttttctcctactgcccccaggagaaatagcactcttctcccttcccccagatggcagggctctggcctccctacacctcataccctgcctgcctcctccaggaggaatctccggggccccttcctgactctccccaccttcgccacttgtctctaggctatgggacaatcatcccattcaccacttgacatccttgacatccttgactttcattcccccaacctccagcaggttggccccaatcctcttcacctctgtgttttcttctagaagatgcattttgggtctgagaggagcattttcctggaaggccatcttttaaggcccctgcttgctgtcatagtgcagagcagaaacttgcacactatttagagagctcccttcccacctctctgcccagccttgttacctcacttctgctctggccatggctgtgaagggcccagccagctccctgttttgatgttctgtgcaacagctccggggtcttgtgactggagatcctcaacaggccctggagccaggactggagtcttggcagctgatgagcagcaccttgccggccaggaggagctgatgctgacgatctccccaacatctgaaggcttaaagaacattgtcgttcttcagccctccttgcttctctcaatacaataagacattgcagaagcaaaagggtggcctctgctccaggcaaggcagctggctctgtctggggcatcggcctggggcttgggtgccacgtgctgagattgcatagtcaaaacagccatttttgccaacaatagcttgtggctccccacattttcctaccctgcactcaagggccagaccactctctgcatggaccagaccatcttcccaaacccatggtgctttttccccaactcaacctagactccaaggtggggagggatgggtcagaggccatagtggcccctggataatcctgacgtggggtggagtggggtgaggcagagggagcagccccaacacctgcactgggccatctatgggaaagaacacgggtcgagtgcagtcgagttgtctggccatctgtatttggatctataactgtactttgcctggcgctgtgcgcaaggtcagaaaacttactgctagtacctagaaacacacaaggctgcccagccaaatcttaatgtaaagtagctagagccatggaagtacagtatgaattaaaaagaaaaaagtattgaactacaataataaatggtgtgcgtgttta

SEQ ID NO: 287 - DNA, 2985 bp, Homo sapiens
ggcgagcgccgatcccggggcgcctgcgcgggtggctttgcgggcgctcgcggtaagtttgcgccaagtgcgcggcagccgggacgcagacggcggcggcggcgagaggcggagcccggggaccaccccccatcaccctccccccagtcacctcacgtaccacaacctcacgtaacctctcaccccccctccgatacccccagccccgggatggcagcgcccgccagccttcccggccggaccggctgtcgccagtgccggctttagcctgtgggactaggccccgccgaggcctgacccccggagccgggacccactgtgcagccagcagccgggccgggactgaggggccgctcccccctcgcggcccgtcgggaggacgctgtcgtcccggggactgggggccggggggtgggggggagccagggcgaggaagtcgggacccgtattgggaaaaaagcggggccggggtcaggagcgccccctcccctcacctcccccctccccccggggttgggggggccggagcagagagcacccagcccgggaggtggatgaatgtgggagaaaatggagaccaagacgatcgtgtacgacttggacacatcaggggggctgatggagcaaatccaagctctgctggctccccccaagacggacgaggcagaaaagcgcagtcggaagcctgagaaggagccccggagaagcggcagggccaccaaccacgacagctgcgatagctgcaaggaaggtggagatctcctgtgctgcgaccactgcccggctgccttccacctccagtgctgtaaccctccactgagtgaagaaatgttgcctcctggagagtggatgtgtcaccggtgcactgttcgccgaaagaaacgagagcagaaaaaggagctgggtcatgtcaatggactggtggacaaatctggcaaacggactacatcccccagcagtgacactgacttgttggacagatcggccagcaaaactgaactaaaggccattgcccatgcccggatcctggaaaggagagccagcaggcctggcacacccacatccagcgccagcacagagactcccacctctgagcagaatgatgtcgacgaagacatcattgacgtggatgaggaaccagtagcagcggagccagactatgtgcagccccagctgaggcggccctttgagctgctgattgctgccgccatggagcggaaccccacccaatttcagttgcccaatgaactgacttgtaccactgcactaccaggttctagcaagaggagaagaaaggaggaaaccacagggaaaaatgttaagaagacacagcatgaattagatcacaatggtctcgttcccttacccgtcaaagtctgcttcacgtgtaacaggagttgccgtgtggctcctctcatccagtgtgactattgccctctcctgtttcacatggattgcctcgagccgccgctcactgccatgcccctgggcagatggatgtgtccgaatcacatcgaacatgtggtgctgaaccagaagaatatgacactgagcaatcggtgccaggtgtttgatcgtttccaggacaccgtttcgcagcatgtcgtcaaagtggacttcctgaaccgaatccacaagaagcacccccctaaccggcgtgtgctccagtcggtcaaaagaagaagcttgaaggttcctgatgctataaaatctcagtaccagtttccaccccctctcattgcacccgcggccattcgggacggggagctgatctgcaatgggatccctgaggaatcacagatgcaccttttgaactctgagcacttagccacccaagcagagcagcaagagtggctctgtagtgttgttgcgctccagtgcagcatattgaaacatttatctgctaagcagatgccttcgcattgggactctgaacagacagagaaggctgatattaagcctgttattgtgactgacagctcagtcaccacctccctgcaaacagctgacaagacacctacaccttcccactaccccttgtcctgcccctcagggattagcacccagaattccctgagctgctctccaccccaccagtccccagccctagaggacatcggctgcagttcttgtgcggaaaaatccaagaaaaccccttgtgggactgccaatgggccagtgaacacagaggtgaaagctaatggcccacacctctacagcagccctactgattccacggacccccggcgacttccaggcgctaacaccccactaccaggcctctcacaccggcaaggctggccccggcccctcacgccaccagcggctgggggccttcagaaccacaccgtcggcatcattgtgaagacagagaatgccactggccccagctcttgcccccagaggagtttggttcctgtcccaagcctgcccccttccattcccagctcttgtgccagcatcgagaacaccagcactttgcaaagaaagactgtccaatcacagataggacctccgttgacagattcaaggccactgggctcacccccaaacgccacccgggtgctcactcccccgcaagcagcaggagatggtatcttggccacaacagccaaccaacgattcagctcaccagcgccatcgtcaggtgagtgctgctcagccttgggttgatttggaataattttatgctctttctggcaaataagattctaaaagcacttatatccctgtgaatacttcagaggactttggcctttgtattgtttgtcttactctcatttccgtaatagaagaggaagcacatgttaacttgtcccgtttataaatgggactgcttaggctctgaaagcttcagtgatttccttaaaatgacctactgagtcagtggcaggattggaaccacagcccaggtctcctgactccatcccataccttccaggcctaggcctctgcctgttttgttctgtcaccttaaaagaaggc

SEQ ID NO: 288 - DNA, 5334 bp, Homo sapiens
gtgacccgaggggcgacagcgcgcggcaggcggcgagctcgggggccgcagaaaatgaaactgaagccgtggtcacgtgacaggacatgtagtatatagcaggctgccagcgactcctgctcttgcttctggatctgcagggcagtcccagcaggacccatggagtgtccttcgtgccagcatgtctccaaggaggaaacccccaagttctgcagccagtgcggagagaggctgcctcctgcagcccccatagcagattctgagaacaataactccacaatggcgtcggcctcggagggtgaaatggagtgtgggcaggagctgaaggaggaagggggcccgtgcttgttcccgggctcagacagttggcaagaaaaccccgaggagccctgttccaaagcctcctggaccgtccaagaaagcaaaaagaagaaaaggaagaagaaaaagaaggggaacaagtccgcttcctcagagctggcttccttgcccctttctcctgccagcccctgtcacctgactttgctttcaaacccgtggcctcaggacacagccctgccccacagccaagcccagcagagtggccccactggccagccgagccagcccccaggcacagccaccacgccactggagggtgacggcctctccgcgcccaccgaggttggcgacagccccctgcaggcccaggctttgggagaggcaggagtggccacaggaagtgaggctcagagcagcccgcaattccaggaccacacggaaggggaggaccaggacgcttccatcccctctgggggcagaggcctgtcccaggaggggaccggtccccccacctctgctggtgaaggccattctaggactgaagatgctgcccaggagctcctgttgcctgagtcaaaaggaggcagctctgagcccgggacagaactgcagaccaccgagcaacaggcaggggcctcagcctctatggcagttgatgctgtagctgagccagccaatgcagttaaaggggccgggaaggaaatgaaagagaagacccagagaatgaaacagccaccagcaaccactcctcctttcaaaacacactgccaggaagctgagaccaagaccaaggacgagatggctgctgctgaagaaaaagtcggtaagaatgaacaaggggagcctgaagacctcaagaagccagaggggaagaacagaagtgcagctgctgtgaaaaacgagaaggagcaaaaaaaccaggaagcagatgtccaggaagtgaaggcaagcacgctgagcccgggtggaggagtcaccgtgttcttccacgccatcatctctcttcatttcccattcaatcctgacctccataaagtcttcatcagaggaggagaagaatttggggagtcaaaatgggacagcaatatctgtgagctgcactacaccagagacttgggtcatgaccgcgttcttgttgaaggcattgtctgcatttccaagaagcacctagataaatacattccttacaagtacgtcatttataatggggaatcttttgagtatgagttcatttacaagcaccagcagaagaagggcgagtacgtcaaccgctgtctgttcataaaatcttcacttctgggctcaggagactggcatcagtactatgacatagtttatatgaagcctcatgggagactccagaaagtcatgaaccacatcacagacgggccgaggaaggacctggtgaaggggaagcagattgccgctgcgctcatgctggacagcaccttcagcatcctgcagacctgggacaccatcaacctgaacagcttcttcacccagttcgagcagttttgctttgtcctgcaacagcctatgatttatgaaggacaggcacagctgtggaccgatttgcagtacagggagaaagaggtgaagagatacctgtggcaacatctgaaaaaacacgtggtaccattgccggacggaaaaagcacggactttttgcctgtggactgcccagtgaggagtaaactgaaaacaggcctgattgtcctttttgtagtggaaaaaattgagcttttattagaaggcagcctggactggttgtgtcacctcctaacctcagatgccagctcaccagatgagtttcaccgtgacctaagccacatccttgggatacctcagagctggcggctgtacctggtgaacctgtgccaaagatgcatggacacaaggacgtacacctggctgggcgccctgcctgtcctgcactgctgtatggagctggccccgcggcacaaggatgcctggagacagcctgaggacacctgggccgctctggagggactctccttctcaccgttccgggaacaaatgctagatacgagttccctacttcagtttatgagagagaagcagcatttgctgagcatagacgagcctctcttccggtcctggtttagtctgctacctctgagtcacctggttatgtatatggaaaacttcattgagcacctgggtcgttttcctgctcatatcctggactgtctttcagggatttactaccggcttccgggacttgagcaagtcttgaatacgcaggatgttcaggatgttcagaacgttcagaacattttagaaatgctgttgcgactcctggacacttaccgggacaagattcccgaggaggccttgtcaccatcctacctgactgtgtgtctgaaactgcatgaagccatctgcagcagcacaaagctacttaagttttacgagctgccagccttatctgccgagattgtctgcagaatgattagacttctatctctggtggattctgcaggacagagagatgaaactggaaataattcagtccaaacagtcttccaagggacccttgctgctacgaaaaggtggctccgagaagtttttacaaagaacatgctcacatcttcaggtgcctcattcacatacgtcaaggaaattgaggtctggaggcggctggtggaaatccaattccccgcggagcatggctggaaggagtcgttgctgggagacatggaatggaggctcacaaaggaggaacccctctcccagatcactgcctactgcaatagttgctgggacaccaaaggcttagaggacagtgtggccaagaccttcgagaaatgcatcattgaagccgtgagctcagcctgccaggtgaacaatctctcctcctgggaaacggattcgggctcacagctgtgttctgccatgacccagctaagggctatgaagcacccgctgggtctcagctcctccgctaactcagagattgggaagtgggcaccctcctccctcgccaagggcaatggcgctgaaatctagttctctccggattcctcagtgtgctgcacagtccctgctgctcgcaccatcctgcatgtgttccatatggaatcacggccgtgcgcgtgtggcacaagtcacacgggcttgcaggccgttcctcagatggccctgtcatcactgtggctgctggtttgattgattgttaacacttgctcagtaggtgtgcgggaagagactccaaaggttgacagaacatttatggaagcaaaatatgtgaaatggaaaattgtatcaatttatttagctcttttcggcaaaggggaagagattgtgcccccctgtctcccaggaacagtctcgcaggcaatgccacatgaggaagctccctgctggccacggctgccctgctcacatttcctaattggacacttaacccctgtacaagcacagccttgcggccacaggggaagtccagaaacattgaggtcattgaattccggggaccaaggggttctaattttttaagtgactgatacctttgataaggttttcctttccctttttcgttaactctttgttgagatattgttcgtatgccatacggtacatctgtcaaaagttccagttcagcaggttttggggtagtcacagatatgtacagtcatcaccacagttaatgacagagcattttcatcacttcaaagagaaacccggcccctttagccatcatcctcctcccctctagtcacccactcccctctgcaggcataaacaattgctgaacataaacaactgcttctgtggctttctctgttctgactgtcatatgaatggaatcatatcatatgtggccttttgggtatggcttatttcactgagcataatgtttttttgttgttggtggtggtggttgtttgttgtttttgagacagagtttcactctttttgcccaggctggagtgcaatggtgcgatcctggctcaccgcaaccgctgcctcccgggttcaagtgattctcctgcctcagcctcccaagtgctggaattacagctactttttgtttaaagagtcttttaattgtttaaagaacaatgtgccgccacactcggttccttttgtatttttagaagagacagggtttctccatgttggtcaggctggtctcgaactcccgacctcaggtgatccacccaccttggcctcccgaagtgccgagattacaggtgtgagccaccgcgcccggccgagcataatgttttgaaagaccgctcaggctggacacggttgctcacgcctgtaatcacggcactttgggagcccaggagttcaagacaagcctgggtaacagagtaagaccctgtctctataaaaactaaaaaataaacaaaaaaaattagccaggcatggccgggcacacctgtggtcccagctacttgggaggctgaggtgggaggctcccttgggcccagaaggtcaaggcagcagtgagccatgatcacaccactgcacttcaacctgggggacagagcaagaccctgtctcaaaaagcaataacaacaaaagtccatccatattgtagcttgtgtccgtttacgttaagtattccttacccaaaatgcttgagaccagaagtgttttggatttcagatgttttcaaattttggaatatttgcatttacataatgagatgtcttccagatgggacccagagtctaaccacaaaattcacttgtttcatatacatcttatacacatagcctgaaggtaattttatacaatatttttaacaattttgtgcatgagacaaagtttgtattaagtatttgtatgttgaatttttcacttgtggcatcattatactcaaaaagtttggattttgtagtattttggatttggggattaggaatgctcaacctatatttcatttttttccatggccaaatattccccgtttatccatgtgtccattgacggccatctatgttgcttcttcggctattataaatctgctgatacaaa

SEQ ID NO: 289 - DNA, 476 bp, Homo sapiens
agtctttcttgaccgtaaaggtaatagaccttttgccatgtctgggcgtggtaagcagggaggcaaagctcgcgccaaggccaagacccgctcttctcgggccgggcttcagtttcccgtaggccgagtgcatcgcctgctccgcaaaggcaactatgcggagcgggtcggtgctggagcgccggtgtacctggcggcggtgctggagtacctgaccgccgagatcctggagctggctggcaacgcggcccgcgacaacaagaagactcgcatcatcccgcgtcacctccagctggccatccgcaacgatgaggagctcaacaagcttctgggcaaagtcaccatcgcacagggtggcgtcctgcccaacatccaggccgtgctgctgccaaagaaaactgagagccaccacaagactaagtaaagaccgagttgaaaagcgcataaaaacaaaggctcttttcagagccacttca

SEQ ID NO: 290 - DNA, 1976 bp, Homo sapiens
agacccttttccggctgacttctgagaaggttgcgcagcagctgtgcccggcagtctagaggcgcagaagaggaagccatcgcctggccccggctctctggaccttgtctcgctcgggagcggaaacagcggcagccagagaactgttttaatcatggacaaacaaaactcacagatgaatgcttctcacccggaaacaaacttgccagttgggtatcctcctcagtatccaccgacagcattccaaggacctccaggatatagtggctaccctgggccccaggtcagctacccacccccaccagccggccattcaggtcctggcccagctggctttcctgtcccaaatcagccagtgtataatcagccagtatataatcagccagttggagctgcaggggtaccatggatgccagcgccacagcctccattaaactgtccacctggattagaatatttaagtcagatagatcagatactgattcatcagcaaattgaacttctggaagttttaacaggttttgaaactaataacaaatatgaaattaagaacagctttggacagagggtttactttgcagcggaagatactgattgctgtacccgaaattgctgtgggccatctagaccttttaccttgaggattattgataatatgggtcaagaagtcataactctggagagaccactaagatgtagcagctgttgttgtccctgctgccttcaggagatagaaatccaagctcctcctggtgtaccaataggttatgttattcagacttggcacccatgtctaccaaagtttacaattcaaaatgagaaaagagaggatgtactaaaaataagtggtccatgtgttgtgtgcagctgttgtggagatgttgattttgagattaaatctcttgatgaacagtgtgtggttggcaaaatttccaagcactggactggaattttgagagaggcatttacagacgctgataactttggaatccagttccctttagaccttgatgttaaaatgaaagctgtaatgattggtgcctgtttcctcattgacttcatgttttttgaaagcactggcagccaggaacaaaaatcaggagtgtggtagtggattagtgaaagtctcctcaggaaatctgaagtctgtatattgattgagactatctaaactcatacctgtatgaattaagctgtaaggcctgtagctctggttgtatacttttgcttttcaaattatagtttatcttctgtataactgatttataaaggtttttgtacattttttaatactcattgtcaatttgagaaaaaggacatatgagtttttgcatttattaatgaaacttcctttgaaaaactgctttgaattatgatctctgattcattgtccattttactaccaaatattaactaaggccttattaatttttatataaattatatcttgtcctattaaatctagttacaatttatttcatgcataagagctaatgttattttgcaaatgccatatattcaaaaaagctcaaagataattttctttactattatgttcaaataatattcaatatgcatattatctttaaaaagttaaatgtttttttaatcttcaagaaatcatgctacacttaacttctcctagaagctaatctataccataatattttcatattcacaagatattaaattaccaattttcaaattattgttagtaaagaacaaaatgattctctcccaaagaaagacacattttaaatactccttcactctaaaactctggtattataacttttgaaagttaatatttctacatgaaatgtttagctcttacactctatccttcctagaaaatggtaattgagattactcagatattaattaaatacaatatcatatatatattcacagagtataaacctaaataatgatctattagattcaaatatttgaaataaaaacttgatttttttgta

SEQ ID NO: 291 - DNA, 1899 bp, Homo sapiens
agagtttcccgggcactcaccgtgtgtagttggcatctccgcgcgtccggacacccgatcccagcatccctgcctgcaggactgttcgtgttcagctcgcgtcctgcagctgtccgaggtgctccagttggaggctgaggttcccgggctctgtagctgagtgggcggcggcaccggcggagatgcctgggaagaaggcgcgcaagaacgctcaaccgagccccgcgcgggctccagcagagctggaagtcgagtgtgctactcaactcaggagatttggagacaaactgaacttccggcagaaacttctgaatctgatatccaaactcttctgctcaggaacctgactgcatcaaaaacttgcatgaggggactccttcaaaagagttttctcaggaggtgcacgtttcatcaatttgaagaaagactgcattgtaattgagaggaatgtgaaggtgcattcatgggtgcccttggaaacggaagatggaatacatcaaagtgaatttctgttcaagttttcccagattatcattctttgggatgagagaacattataaaaccactttgtttattttaaagcaagaatggaagacccttgaaaataaagaagtaattattgacacatttcttttttacttagagaatcgttctagtgtttttgccgaagattaccgctggcctactgtgaagggagatgacctgtgattagactgggcggctggggagaaacagttcagtgcattgttgttgttgctgtttttggtgttttgcttttcagtgccaactcagcacattgtatatgattcggtttatacatattaccttgttataatgaaaaaactcattctgagaacactgaaatgttatactcagtgttgatttcttcggtcactacacaacgtaaaatcatttgtttcttttgactcaaattgtattgcttctgttcagatgatctttcattcaatgtgttcctgttgggcgttactagaaactatggaaaactggaaaataactttgaaaaaattggataaagtataggagggttacttggggccagtaaatcagtagactgaacattcaatataataaaagaacatggggattttgtataaccagggataataaaaagaaaaaagaagttaatttttaattgatgtttttgaaacttagtagaacaaatattcagaagtaacttgataagatatgaatgtttctaaagaagtttctaaaggttcggaaaatgctccttgtcacattagtgtgcatcctacaaaaagtgatctcttaatgtaaattaagaatattttcataattggaatatacttttcttaaaaaaaaggaacagttagttctcatctagaatgaaagttccatatatgcattggtgaatatatatgtatacacatacttacatacttatatgggtatctgtatagataatttgtattagagtattatatagcttcttagtagggtctcaagtaagtttcattttttttatctgggctatatacagtcctcaaataaataatgtcttgattttatttcagcaggaataattttatttattttgcctatttataattaaagtatttttctttagtttgaaaatgtgtattaaagttacatttttgagttacaagagtcttataactacttgaatttttagttaaaatgtcttaatgtaggttgtagtcactttagatggaaaattacctcacatctgttttcttcagtattacttaagattgtttatttagtggtagagagttttttttttcagcctagaggcagctattttaccatctggtatttatggtctaatttgtatttaaacatatgcacacatataaaagttgatactgtggcagtaaactattaaaagttttcactgtt

SEQ ID NO: 292 - DNA, 1701 bp, Homo sapiens
agtccaggccttgagacccagaagggagcgaaggtttttgctgcgccaacgcagtgaccgaaggctccgctcacgcccggcctgatcctgcctgaagatggtgccactggtggctgtggtatcagggccccgtgcccagctctttgcctgcctgctcaggctgggcactcagcaggtcggcccccttcagctgcacaccggggccagccatgcggccaggaaccattatgaggtgctggtgctgggtgggggcagtggcggaatcaccatggctgcccgcatgaagaggaaagtgggtgcagagaatgtggccattgttgagcccagtgagagacatttctaccagccaatctggacactggtgggtgctggtgccaaacaattgtcctcatctggtcgtcccacggcaagtgtgattccatctggtgtagaatggatcaaagctagagtgactgagttgaacccagacaagaactgcattcacacagatgacgacgagaagatctcctaccgatatcttattattgctctcggaatccagctggactatgagaagattaaaggcctacctgaaggtttcgctcatcccaaaatagggtcgaattattcagttaagactgtagagaagacatggaaagctctgcaggacttcaaagagggcaatgccatcttcaccttcccaaatactccagtgaagtgtgctggagcccctcagaagatcatgtacttatcagaagcctacttcaggaagacagggaagcgatccaaggccaatatcattttcaacacttctcttggagccattttcggggttaagaagtatgcagatgccctgcaggagatcatccaggagcggaacctcactgttaactacaagaaaaacctcattgaagtccgagccgataaacaagaggctgtatttgagaacctggacaaaccaggagagacccaagtgatttcatatgaaatgcttcatgtcacacctccaatgagcccaccagatgtcctcaagaccagtcctgtggctgatgctgctggttgggtggatgtggataaagaaactctgcaacacaggaggtacccaaatgtgtttgggattggggactgcaccaaccttcctacgtcaaagaccgctgctgcagtagctgcccagtcaggaatacttgataggacaatttctgtaattatgaagaatcaaacaccaacaaagaagtatgatggctacacatcatgtccactggtgaccggctacaaccgtgtgattcttgctgagtttgactacaaagcagagccgctagaaaccttcccctttgatcaaagcaaagagcgcctttccatgtatctcatgaaagctgacctgatgcctttcctgtattggaatatgatgctaaggggttactggggaggaccagcgtttctgcgcaagttgtttcatctaggtatgagttaaggatggctcagcacttgctcatcttggatggcttctgggccaaaactgcagtcactgaatgaccaagagcagcacgaaggacttggaacctatccttgtaaagagttccttgatgggtaatggtgaccaaatgcctcccttttcagtacctttgaacagcaaccatgtgggctactcatgatgggcttgattctttgggaataataaaatgaaataatacttttattttctgaataaaagtttgtcactga

SEQ ID NO: 293 - DNA, 812 bp, Homo sapiens
agttccggtgagtccgtgggtggggtccccacctggttggaaggctgtgggtccgggaacccgagcccaaggagtgggggcggccccggagcgaggctcacactccctgccctgcagatgactgtccacaacctgtacctgtttgaccggaatggagtgtgtctgcactacagcgaatggcaccgcaagaagcaagcagggattcccaaggaggaggagtataagctgatgtacgggatgctcttctctatccgctcgtttgtcagcaagatgtccccgctagacatgaaggatggcttcctggccttccaaactagccgttacaaactccattactacgagacgcccactgggatcaaagttgtcatgaatactgacttgggcgtgggacccatccgagatgtgctgcaccacatctacagtgcgctgtatgtggagctggtggtgaagaatcccctgtgcccgctgggccaaactgtgcaaagtgagctctttcgctcccgactggactcctatgttcgctctctgcccttcttctccgcccgggctggctgaagcaacctacctcaagtctcaggagaattcatgtctgcctggggcccttccgaacctgtgccaactaagggcccccactgtaagcccccgcacccccaccccctgcccagagcaacagcctaaaggcctgccctgatgctctcctcctaccagagtgaagcccacagagtccctccacctccacaccaggccctctctccagttttatcccctgcctaatgctgcgagaagcacagaataaactttttgtcactctc

SEQ ID NO: 294 - DNA, 3203 bp, Homo sapiens
acattaacccctgactcacagctggaccgccccggcccgcagcgccacgtcccgggtggggcctgccacggcaaagcagcagtccggcctcgagcggcccctcgggggcggcggggtgggcgccaacagcagtcaggcctgacaagcggcgacctccaagggtgaggcctctgcgggcccccgactcacgcgcgtccgggctctgcaagcgcggtggggagcaggctgctgtggtcgcggggactgggttgcggcgcgccgcgtacgggacggccccaaactctcgacgcccggggcaagacgcccaccccctgggcgctctcgctgggccagaaaggaagacagaaaagccgcgggctgactgtggtggcgctcgcctgcagattgaaaagaaatgctgagaaatacataaagttttcctcttctgccttggatatttataatgggtatcgggaagtctaaaataaattcctgccctctttctctctcttggggtaaaaggcacagtgtggatacaagtccaggatatcatgagtcagattccaagaagtctgaagatctatccttgtgtaatgttgctgagcacagcaatacaacagaggggccaacaggaaagcaggagggagctcagagcgtggaagagatgtttgaagaagaagctgaagaagaggtgttcctcaaatttgtgatattgcatgcagaagatgacacagatgaagccctcagagtccagaatctgctacaagatgactttggtatcaaacccggaataatctttgctgagatgccatgtggcagacagcatttacagaatttagatgatgctgtaaatgggtctgcatggacaatcttattactgactgaaaactttttaagagatacttggtgtaatttccagttctatacgtccctaatgaactccgttaacaggcagcataaatacaactctgttatacccatgcggcccctgaacaatccccttccccgagaaaggactccctttgccctccaaaccatcaatgccttagaggaagaaagtcgtggatttcctacacaagtagaaagaatttttcaggagtctgtgtataagacacaacaaactatatggaaagagacaagaaatatggtacaaagacaatttattgcctgagatgaaacatataacatgtggctggctcttgttttgtaaaccaaatgattaatcttcacttgagaaagcagtttctaggaaatgtttaaataaaagagagtcttcaccttaaagaaacctatggagcacaagaaagataaatttctgcaggacagcctataaaattgtggtactttttgatgtttcagtaaacttgacattgtcagagtttcaaggacttttctttcacaattttcctagttcatggatatgaaaaaggaattctcaatccatattccttgtattgaaccttgaacaaaaacttgtatgacagacatttttaaaaatgtgacaacacttttattctctgaattttgatctcaaaggacacagaaaaaaaatggccccaggagatctgatcacacttcctcctgaggcacctctcatggatgttgcaataagcattcgggtactatcacccagaaatatgaattgccagaatagaacatttagcatgttaagcgttgatgcatataaaatcagaaatagatgtgagaatggtggaactttttaaaagaacccagtcaaatgtattttctgctgaaatctgcatatttggaggcatttcccaccaccgattcacagcccatttgatagtgtggtagttagggacttcgtggagtggtgttcagacgtcccctggggcttaaatctcttcatattagtcatcatttgtaactatggctttatttgcagagcttctaaaaggcgtataactgtgtgagtggccagatattcactttttaaatcaaaaacctctcttatggaagctttaaaagtttccgtcacacacaattctcttctcaggaagtatttctcatttaggtcttcaaagtagcctgactgtgtgcatgtgtgtgtgtgataggttatttataaagactttggatagaaggagatgtattttattacctcctattctagagccccatgctcctaacaagccagagaggccccaaacaggattgtttctttcctccacagcccttctgcccatctgagattgagggagcatcgtccacttgagatcagggatggggtggagaatgggtcatgtcatgtaatgagaaaagccctcttcgggatcatgagacttggttctagtccaatttctgccactgaggatgaatgtaactgtgggcaaactatttaccctcctttatctgtgaaatgaaagggttgaattgatggatctctaaaggcttttgtcctctatgaggatgtgaaaaactagggaccacaaaagggaacaagcaaaaaagtttggattcgataaagtgatatgtaatagttgcagaaggctttatatatgcttataatgaaaagatattttttgtatattgacagcataatttatttttaatgctgtcattacacttaaagtcacaggaaaaaaatatacatgcttactcaggctttcttaaaaataaatttttatagagatccttgagtaaagacattttgcttaatttcttttttcttattccccacttgtatatcccctaccagtaccgggatctgcacacatctttttgcagttacctcttcatagccatgaaccaaaacgttctatgaggagcatgcaagtaagtcaagcctcctattctgttagtacttattagaggaggagatggttttcattgcatagtgacattttcttagccttaacgttctgatagtagcttactactcacttctctttttcagttttcataataagtattcatttttttgccataatgcttcctgtaaagccaattttatatactaataaaacatgaactgcccactcttcatgcctgccaaacttggggcaattgatgctaaatggtatttttaaaataaatgtttttattctttactcttgactaaacttgtttattttcaactccaatgaagattgtggaagagtgttttgaaatgaagcatcgatttgtacttcatagagcaccagacacaatgtctcacccaatttggagttccatattttttttatgataaagaaaaatgttgg

SEQ ID NO: 295 - DNA, 1564 bp, Homo sapiens
gggctgtcctaaaaccagaagcttggagcagaaagtgaaaccctggtgctccagacaaagatcttagtcgggactagccggccaaggatgaagcctcacttcagaaacacagtggagcgaatgtatcgagacacattctcctacaacttttataatagacccatcctttctcgtcggaataccgtctggctgtgctacgaagtgaaaacaaagggtccctcaaggccccctttggacgcaaagatctttcgaggccaggtgtattccgaacttaagtaccacccagagatgagattcttccactggttcagcaagtggaggaagctgcatcgtgaccaggagtatgaggtcacctggtacatatcctggagcccctgcacaaagtgtacaagggatatggccacgttcctggccgaggacccgaaggttaccctgaccatctttgttgcccgcctctactacttctgggacccagattaccaggaggcgcttcgcagcctgtgtcagaaaagagacggtccgcgtgccaccatgaagatcatgaattatgacgaatttcagcactgttggagcaagttcgtgtacagccaaagagagctatttgagccttggaataatctgcctaaatattatatattactgcacatcatgctgggggagattctcagacactcgatggatccacccacattcactttcaactttaacaatgaaccttgggtcagaggacggcatgagacttacctgtgttatgaggtggagcgcatgcacaatgacacctgggtcctgctgaaccagcgcaggggctttctatgcaaccaggctccacataaacacggtttccttgaaggccgccatgcagagctgtgcttcctggacgtgattcccttttggaagctggacctggaccaggactacagggttacctgcttcacctcctggagcccctgcttcagctgtgcccaggaaatggctaaattcatttcaaaaaacaaacacgtgagcctgtgcatcttcactgcccgcatctatgatgatcaaggaagatgtcaggaggggctgcgcaccctggccgaggctggggccaaaatttcaataatgacatacagtgaatttaagcactgctgggacacctttgtggaccaccagggatgtcccttccagccctgggatggactagatgagcacagccaagacctgagtgggaggctgcgggccattctccagaatcaggaaaactgaaggatgggcctcagtctctaaggaaggcagagacctgggttgagcctcagaataaaagatcttcttccaagaaatgcaaacaggctgttcaccaccatctccagctgatcacagacaccagcaaagcaatgcactcctgaccaagtagattcttttaaaaattagagtgcattactttgaatcaaaaatttatttatatttcaagaataaagtactaagattgtgctcaatacacagaaaagtttcaaacctactaatccagcgacaatttgaatcggttttgtaggtagaggaataaaatgaaatactaaatctttctgta

SEQ ID NO: 296 - DNA, 3552 bp, Homo sapiens
aacgctccgccggcgccaatttcaaacagcggaacaaactgaaagctccggtgccagaccccacccccggccccggcccgggaccccctcccctcccgggatcccccggggttcccaccccgcccgcaccgccggggacccggccggtccggcgcgagcccccgtccggggccctggctcggcccccaggttggaggagcccggagcccgccttcggagctacggcctaacggcggcggcgactgcagtctggagggtccacacttgtgattctcaatggagagtgaaaacgcagattcataatgaaaactagcccccgtcggccactgattctcaaaagacggaggctgccccttcctgttcaaaatgccccaagtgaaacatcagaggaggaacctaagagatcccctgcccaacaggagtctaatcaagcagaggcctccaaggaagtggcagagtccaactcttgcaagtttccagctgggatcaagattattaaccaccccaccatgcccaacacgcaagtagtggccatccccaacaatgctaatattcacagcatcatcacagcactgactgccaagggaaaagagagtggcagtagtgggcccaacaaattcatcctcatcagctgtgggggagccccaactcagcctccaggactccggcctcaaacccaaaccagctatgatgccaaaaggacagaagtgaccctggagaccttgggaccaaaacctgcagctagggatgtgaatcttcctagaccacctggagccctttgcgagcagaaacgggagacctgtgcagatggtgaggcagcaggctgcactatcaacaatagcctatccaacatccagtggcttcgaaagatgagttctgatggactgggctcccgcagcatcaagcaagagatggaggaaaaggagaattgtcacctggagcagcgacaggttaaggttgaggagccttcgagaccatcagcgtcctggcagaactctgtgtctgagcggccaccctactcttacatggccatgatacaattcgccatcaacagcactgagaggaagcgcatgactttgaaagacatctatacgtggattgaggaccactttccctactttaagcacattgccaagccaggctggaagaactccatccgccacaacctttccctgcacgacatgtttgtccgggagacgtctgccaatggcaaggtctccttctggaccattcaccccagtgccaaccgctacttgacattggaccaggtgtttaagccactggacccagggtctccacaattgcccgagcacttggaatcacagcagaaacgaccgaatccagagctccgccggaacatgaccatcaaaaccgaactccccctgggcgcacggcggaagatgaagccactgctaccacgggtcagctcatacctggtacctatccagttcccggtgaaccagtcactggtgttgcagccctcggtgaaggtgccattgcccctggcggcttccctcatgagctcagagcttgcccgccatagcaagcgagtccgcattgcccccaaggtgctgctagctgaggaggggatagctcctctttcttctgcaggaccagggaaagaggagaaactcctgtttggagaagggttttctcctttgcttccagttcagactatcaaggaggaagaaatccagcctggggaggaaatgccacacttagcgagacccatcaaagtggagagccctcccttggaagagtggccctccccggccccatctttcaaagaggaatcatctcactcctgggaggattcgtcccaatctcccaccccaagacccaagaagtcctacagtgggcttaggtccccaacccggtgtgtctcggaaatgcttgtgattcaacacagggagaggagggagaggagccggtctcggagaaaacagcatctactgcctccctgtgtggatgagccggagctgctcttctcagaggggcccagtacttcccgctgggccgcagagctcccgttcccagcagactcctctgaccctgcctcccagctcagctactcccaggaagtgggaggaccttttaagacacccattaaggaaacgctgcccatctcctccaccccgagcaaatctgtcctccccagaacccctgaatcctggaggctcacgcccccagccaaagtagggggactggatttcagcccagtacaaacctcccagggtgcctctgaccccttgcctgaccccctggggctgatggatctcagcaccactcccttgcaaagtgctcccccccttgaatcaccgcaaaggctcctcagttcagaacccttagacctcatctccgtcccctttggcaactcttctccctcagatatagacgtccccaagccaggctccccggagccacaggtttctggccttgcagccaatcgttctctgacagaaggcctggtcctggacacaatgaatgacagcctcagcaagatcctgctggacatcagctttcctggcctggacgaggacccactgggccctgacaacatcaactggtcccagtttattcctgagctacagtagagccctgcccttgcccctgtgctcaagctgtccaccatcccgggcactccaaggctcagtgcaccccaagcctctgagtgaggacagcaggcagggactgttctgctcctcatagctccctgctgcctgattatgcaaaagtagcagtcacaccctagccactgctgggaccttgtgttccccaagagtatctgattcctctgctgtccctgccaggagctgaagggtgggaacaacaaaggcaatggtgaaaagagattaggaaccccccagcctgtttccattctctgcccagcagtctcttaccttccctgatctttgcagggtggtccgtgtaaatagtataaattctccaaattatcctctaattataaatgtaagcttatttccttagatcattatccagagactgccagaaggtgggtaggatgacctggggtttcaattgacttctgttccttgcttttagttttgatagaagggaagacctgcagtgcacggtttcttccaggctgaggtacctggatcttgggttcttcactgcagggacccagacaagtggatctgcttgccagagtcctttttgcccctccctgccacctccccgtgtttccaagtcagctttcctgcaagaagaaatcctggttaaaaaagtcttttgtattgggtcaggagttgaatttggggtgggaggatggatgcaactgaagcagagtgtgggtgcccagatgtgcgctattagatgtttctctgataatgtccccaatcataccagggagactggcattgacgagaactcaggtggaggcttgagaaggccgaaagggcccctgacctgcctggcttccttagcttgcccctcagctttgcaaagagccaccctaggccccagctgaccgcatgggtgtgagccagcttgagaacactaactactcaataaaagcgaaggtggacatgc

SEQ ID NO: 297 - DNA, 3305 bp, Homo sapiens
gtgagagcggagctgcagccggagaaagaggaagagggagagagagcgcgccagggcgagggcaccgccgccggtcgggcgcgctgggcctgcccggaatcccgccgcctgcgccccgcgccccgcgccctgcgggccatgggagccggccgccggcagggacgacgcctgtgagacccgcgagcggcctcggggaccatggggagcgatcgggcccgcaagggcggagggggcccgaaggacttcggcgcgggactcaagtacaactcccggcacgagaaagtgaatggcttggaggaaggcgtggagttcctgccagtcaacaacgtcaagaaggtggaaaagcatggcccggggcgctgggtggtgctggcagccgtgctgatcggcctcctcttggtcttgctggggatcggcttcctggtgtggcatttgcagtaccgggacgtgcgtgtccagaaggtcttcaatggctacatgaggatcacaaatgagaattttgtggatgcctacgagaactccaactccactgagtttgtaagcctggccagcaaggtgaaggacgcgctgaagctgctgtacagcggagtcccattcctgggcccctaccacaaggagtcggctgtgacggccttcagcgagggcagcgtcatcgcctactactggtctgagttcagcatcccgcagcacctggtggaggaggccgagcgcgtcatggccgaggagcgcgtagtcatgctgcccccgcgggcgcgctccctgaagtcctttgtggtcacctcagtggtggctttccccacggactccaaaacagtacagaggacccaggacaacagctgcagctttggcctgcacgcccgcggtgtggagctgatgcgcttcaccacgcccggcttccctgacagcccctaccccgctcatgcccgctgccagtgggccctgcggggggacgccgactcagtgctgagcctcaccttccgcagctttgaccttgcgtcctgcgacgagcgcggcagcgacctggtgacggtgtacaacaccctgagccccatggagccccacgccctggtgcagttgtgtggcacctaccctccctcctacaacctgaccttccactcctcccagaacgtcctgctcatcacactgataaccaacactgagcggcggcatcccggctttgaggccaccttcttccagctgcctaggatgagcagctgtggaggccgcttacgtaaagcccaggggacattcaacagcccctactacccaggccactacccacccaacattgactgcacatggaacattgaggtgcccaacaaccagcatgtgaaggtgcgcttcaaattcttctacctgctggagcccggcgtgcctgcgggcacctgccccaaggactacgtggagatcaacggggagaaatactgcggagagaggtcccagttcgtcgtcaccagcaacagcaacaagatcacagttcgcttccactcagatcagtcctacaccgacaccggcttcttagctgaatacctctcctacgactccagtgacccatgcccggggcagttcacgtgccgcacggggcggtgtatccggaaggagctgcgctgtgatggctgggccgactgcaccgaccacagcgatgagctcaactgcagttgcgacgccggccaccagttcacgtgcaagaacaagttctgcaagcccctcttctgggtctgcgacagtgtgaacgactgcggagacaacagcgacgagcaggggtgcagttgtccggcccagaccttcaggtgttccaatgggaagtgcctctcgaaaagccagcagtgcaatgggaaggacgactgtggggacgggtccgacgaggcctcctgccccaaggtgaacgtcgtcacttgtaccaaacacacctaccgctgcctcaatgggctctgcttgagcaagggcaaccctgagtgtgacgggaaggaggactgtagcgacggctcagatgagaaggactgcgactgtgggctgcggtcattcacgagacaggctcgtgttgttgggggcacggatgcggatgagggcgagtggccctggcaggtaagcctgcatgctctgggccagggccacatctgcggtgcttccctcatctctcccaactggctggtctctgccgcacactgctacatcgatgacagaggattcaggtactcagaccccacgcagtggacggccttcctgggcttgcacgaccagagccagcgcagcgcccctggggtgcaggagcgcaggctcaagcgcatcatctcccaccccttcttcaatgacttcaccttcgactatgacatcgcgctgctggagctggagaaaccggcagagtacagctccatggtgcggcccatctgcctgccggacgcctcccatgtcttccctgccggcaaggccatctgggtcacgggctggggacacacccagtatggaggcactggcgcgctgatcctgcaaaagggtgagatccgcgtcatcaaccagaccacctgcgagaacctcctgccgcagcagatcacgccgcgcatgatgtgcgtgggcttcctcagcggcggcgtggactcctgccagggtgattccgggggacccctgtccagcgtggaggcggatgggcggatcttccaggccggtgtggtgagctggggagacggctgcgctcagaggaacaagccaggcgtgtacacaaggctccctctgtttcgggactggatcaaagagaacactggggtataggggccggggccacccaaatgtgtacacctgcggggccacccatcgtccaccccagtgtgcacgcctgcaggctggagactggaccgctgactgcaccagcgcccccagaacatacactgtgaactcaatctccagggctccaaatctgcctagaaaacctctcgcttcctcagcctccaaagtggagctgggaggtagaaggggaggacactggtggttctactgacccaactgggggcaaaggtttgaagacacagcctcccccgccagccccaagctgggccgaggcgcgtttgtgcatatctgcctcccctgtctctaaggagcagcgggaacggagcttcggggcctcctcagtgaaggtggtggggctgccggatctgggctgtggggcccttgggccacgctcttgaggaagcccaggctcggaggaccctggaaaacagacgggtctgagactgaaattgttttaccagctcccagggtggacttcagtgtgtgtatttgtgtaaatgagtaaaacattttatttcttttta

SEQ ID NO: 298 - DNA, 3267 bp, Homo sapiens
gaggtggcgaggggcgtggcttggctgtcaggtctcttcgccttttgttcggttactgagttgctgccttggccagagtccggagcagccgccgcccgaccacgccgagctcagttcgctgtccgcgccggctcccaccccggcccgaccccgacccggcccggtcaggccccatactcagtagccacgatggaggtgatgaacctgatggagcagcctatcaaggtgactgagtggcagcagacatacacctacgactcgggtatccactcgggcgccaacacctgcgtgccctccgtcagcagcaagggcatcatggaggaggatgaggcctgcgggcgccagtacacgctcaagaaaaccaccacttacacccagggggtgccccccagccaaggtgatctggagtaccagatgtccacaacagccagggccaaacgggtgcgggaggccatgtgccctggtgtgtcaggcgaggacagctcgcttctgctggccacccaggtggaggggcaggccaccaacctgcagcgactggccgagccgtcccagctgctcaagtcggccattgtgcatctcatcaactaccaggacgatgccgagctggccactcgcgccctgcccgagctcaccaaactgctcaacgacgaggacccggtggtggtgaccaaggcggccatgattgtgaaccagctgtcgaagaaggaggcgtcgcggcgggccctgatgggctcgccccagctggtggccgctgtcgtgcgtaccatgcagaataccagcgacctggacacagcccgctgcaccaccagcatcctgcacaacctctcccaccaccgggaggggctgctcgccatcttcaagtcgggtggcatccctgctctggtccgcatgctcagctcccctgtggagtcggtcctgttctatgccatcaccacgctgcacaacctgctcctgtaccaggagggcgccaagatggccgtgcgcctggccgacgggctgcaaaagatggtgcccctgctcaacaagaacaaccccaagttcctggccatcaccaccgactgcctgcagctcctggcctacggcaaccaggagagcaagctgatcatcctggccaatggtgggccccaggccctcgtgcagatcatgcgtaactacagttatgaaaagctgctctggaccaccagtcgtgtgctcaaggtgctatccgtgtgtcccagcaataagcctgccattgtggaggctggtgggatgcaggccctgggcaagcacctgaccagcaacagcccccgcctggtgcagaactgcctgtggaccctgcgcaacctctcagatgtggccaccaagcaggagggcctggagagtgtgctgaagattctggtgaatcagctgagtgtggatgacgtcaacgtcctcacctgtgccacgggcacactctccaacctgacatgcaacaacagcaagaacaagacgctggtgacacagaacagcggtgtggaggctctcatccatgccatcctgcgtgctggtgacaaggacgacatcacggagcctgccgtctgcgctctgcgccacctcactagccgccaccctgaggccgagatggcccagaactctgtgcgtctcaactatggcatcccagccatcgtgaagctgctcaaccagcccaaccagtggccactggtcaaggcaaccatcggcttgatcaggaatctggccctgtgcccagccaaccatgccccgctgcaggaggcagcggtcatcccccgcctcgtccaactgctggtgaaggcccaccaggatgcccagcgccacgtagctgcaggcacacagcagccctacacggatggtgtgaggatggaggagattgtggagggctgcaccggagcactgcacatcctcgcccgggaccccatgaaccgcatggagatcttccggctcaacaccattcccctgtttgtgcagctcctgtactcgtcggtggagaacatccagcgcgtggctgccggggtgctgtgtgagctggcccaggacaaggaggcggccgacgccattgatgcagagggggcctcggccccactcatggagttgctgcactcccgcaacgagggcactgccacctacgctgctgccgtcctgttccgcatctccgaggacaagaacccagactaccggaagcgcgtgtccgtggagctcaccaactccctcttcaagcatgacccggctgcctgggaggctgcccagagcatgattcccatcaatgagccctatggagatgacatggatgccacctaccgccccatgtactccagcgatgtgccccttgacccgctggagatgcacatggacatggatggagactaccccatcgacacctacagcgacggcctcaggcccccgtaccccactgcagaccacatgctggcctaggcggcctggccccagtgcggttcctcatctgagaggctctccgtgcaggcgatggggcaagacagaaaagtgcctgagctggggaagccggggtgtaacttcctgctgcaccctgcgcctccagaggtcctccgtagggtctttcttgggatagtgttctgctcctgcttttctgtcctgggcatgggtccagggcctgacaccccctccccgcccctgtggccctggccactaaagcttcagactcaagtacccattctgttttcccccagcaacgcccctccaaacctccagcctccctgtctccagctgcctgggcccggaagggctttggttccttctctgggtctgattttctcactgaactccaccgaccaactgccctaagcccccagggcctccagggcccaggttcgagacccaaacccccaaaatccaaaacttctcttgaaaagttcagggaccgtccaggggagatggggaggagatatggagtgagtcacctgctccagaagatgccagcttctctctccagggtgcttagttggctttgcccacccctcactccccagggagctctggggacagcttcctcacacccctgtcccacccacacagctgccctagctgaccccgagaagtgctcttggctgacccctctggtgtgtggtgaggggctttctcttccccttcctgtttcagacccccccatttcccgcacatggtgtggggggctgggggaggtccaagcagagtgttttattattatcgctttatgtttttggttattggtttttttgtatagaccaaagcaaagaaaataaaaataacacagatgcg

SEQ ID NO: 299 - DNA, 3047 bp, Homo sapiens
gggacagagacccctgtgggttgtgaggccgccccgggcggtggcagcaagaagagggactccctggggactgcgggctcagcgcacctcattatcaaggatcttggagaaattcattcaaggcttttggatcacagaccagttattcaaggtgaaactcgttattttgtaaaagaatttgaagaaaaacgtggtcttcgagaaatgcgagttcttgaaaatttgaagaacatgatccatgaaacaaatgaacatactcttcccaaatgtagagacacaatgcgggacagcctcagccaggttctccagagattgcaagcagctaatgactcagtctgtagactccaacagagggaacaggaacgaaaaaaggtgtggacactgccagcggctgcagccgacttggaatgacctgggagacaaatacaacagcatggaagatgccaaagtctatgtggctaaagtggactgcacggcccactccgacgtgtgctccgcccagggggtgcgaggataccccaccttaaagcttttcaagccaggccaagaagctgtgaagtaccagggtcctcgggacttccagacactggaaaactggatgctgcagacactgaacgaggagccagtgacaccagagccggaagtggaaccgcccagtgcccccgagctcaagcaagggctgtatgagctctcagcaagcaactttgagctgcacgttgcacaaggcgaccactttatcaagttcttcgctccgtggtgtggtcactgcaaagccctggctccaacctgggagcagctggctctgggccttgaacattccgaaactgtcaagattggcaaggttgattgtacacagcactatgaactctgctccggaaaccaggttcgtggctatcccactcttctctggttccgagatgggaaaaaggtggatcagtacaagggaaagcgggatttggagtcactgagggagtacgtggagtcgcagctgcagcgcacagagactggagcgacggagaccgtcacgccctcagaggccccggtgctggcagctgagcccgaggctgacaagggcactgtgttggcactcactgaaaataacttcgatgacaccattgcagaaggaataaccttcatcaagttttatgctccatggtgtggtcattgtaagactctggctcctacttgggaggaactctctaaaaaggaattccctggtctggcgggggtcaagatcgccgaagtagactgcactgctgaacggaatatctgcagcaagtattcggtacgaggctaccccacgttattgcttttccgaggagggaagaaagtcagtgagcacagtggaggcagagaccttgactcgttacaccgctttgtcctgagccaagcgaaagacgaactttaggaacacagttggaggtcacctctcctgcccagctcccgcaccctgcgtttaggagttcagtcccacagaggccactgggttcccagtggtggctgttcagaaagcagaacatactaagcgtgaggtatcttctttgtgtgtgtgttttccaagccaacacactctacagattctttattaagttaagtttctctaagtaaatgtgtaactcatggtcactgtgtaaacattttcagtggcgatatatcccctttgaccttctcttgatgaaatttacatggtttcctttgagactaaaatagcgttgagggaaatgaaattgctggactatttgtggctcctgagttgagtgattttggtgaaagaaagcacatccaaagcatagtttacctgcccacgagttctggaaaggtggccttgtggcagtattgacgttcctctgatcttaaggtcacagttgactcaatactgtgttggtccgtagcatggagcagattgaaatgcaaaaacccacacctctggaagataccttcacggccgctgctggagcttctgttgctgtgaatacttctctcagtgtgagaggttagccgtgatgaaagcagcgttacttctgaccgtgcctgagtaagagaatgctgatgccataactttatgtgtcgatacttgtcaaatcagttactgttcaggggatccttctgtttctcacggggtgaaacatgtctttagttcctcatgttaacacgaagccagagcccacatgaactgttggatgtcttccttagaaagggtaggcatggaaaattccacgaggctcattctcagtatctcattaactcattgaaagattccagttgtatttgtcacctggggtgacaagaccagacaggctttcccaggcctgggtatccagggaggctctgcagccctgctgaagggccctaactagagttctagagtttctgattctgtttctcagtagtccttttagaggcttgctatacttggtctgcttcaaggaggtcgaccttctaatgtatgaagaatgggatgcatttgatctcaagaccaaagacagatgtcagtgggctgctctggccctggtgtgcacggctgtggcagctgttgatgccagtgtcctctaactcatgctgtccttgtgattaaacacctctatctcccttgggaataagcacatacaggcttaagctctaagatagataggtgtttgtccttttaccatcgagctacttcccataataaccactttgcatccaacactcttcacccacctcccatacgcaaggggatgtggatacttggcccaaagtaactggtggtaggaatcttagaaacaagaccacttatactgtctgtctgaggcagaagataacagcagcatctcgaccagcctctgccttaaaggaaatctttattaatcacgtatggttcacagataattctttttttaaaaaaacccaacctcctagagaagcacaactgtcaagagtcttgtacacacaacttcagctttgcatcacgagtcttgtattccaagaaaatcaaagtggtacaatttgtttgtttacactatgatactttctaaataaactctttttttttaaaaaaaaaaaaaaaa

SEQ ID NO: 300 - DNA, 1501 bp, Homo sapiens
ctcttcctgagaaacgagcaaacctgaaagctactctctcagcttcagagggaaaaaatggttgtagatttctggacttgggagcagacatttcaagaactaatccaagaggcaaaaccccgggccacatggacgctgaagttggatggcaaccttcagctagactgcctggctcaagggtggaagcaataccaacagagagcatttggctggttccggtgttcctcctgccagcgaagttgggcttccgcccaagtgcagattctgtgccacacgtactgggagcactggacatcccagggtcaggtgcgtatgaggctctttggccaaaggtgccagaagtgctcctggtcccaatatgagatgcctgagttctcctcggatagcaccatgaggattctgagcaacctggtgcagcatatactgaagaaatactatggaaatggcacgaggaagtctccagaaatgccagtaatcctggaagtgtccctggaaggatcccatgacacagccaattgtgaggcatgcactttgggcatctgtggacagggcttaaaaagctgcatgacaaagccgtccaaatccctactcccccacctaaagactgggaattcctcacctggaattggtgctgtgtacctcgcaaaccaagccaagaaccagtcagctgaggcaaaagaggctaaggggagtgggtatgagaaattagggcccagtcgagacccagatccactgaacatctgtgtctttattttgctgcttgtatttattgtagtcaaatgctttacatcagaatgatgaaaataggcttgccactttctcttattttaattccatggtagtcaatgaactggctgccactttaatataactgaaaattcattttgagaccaagcaggatcaagtttgtagaataaacactggtttcctagccatcctctgaaaacagtatgaaacatgaccaagtacataatggatttagtaataaatattgtcgaattgctaaaaagtcttcaatcattcattcactaagtcactcagtgatatcaatatacttagctcagaaagtgtgggaggctgaataatggtgtctcccaacatatgcatgacttaatccccagaacctgtaaacatgttactttacatggtagaatggactttgcggatgtaattaaggaccttgaaatggttagattatttcatattgtccgggtggataagaaccaggattttgtaacagggaggcaacaagctcaaaatcagaaaaaagagatttgtcaatggaacaagaggttgaagtgctttgaagttggaggaagaggtcacaggcaaaaaagtacaggcagcctttagaaacccaaaaggacaaaggaacagattctcccctggagtctgcagaaggaaccagccctgcctgcacatggctttagcccagtgacactgattttggacatctgaccttcagaactgcttgctcataaacttgtcttgttttaatgca

SEQ ID NO: 301 - DNA, 4675 bp, Homo sapiens
acttacttgtggcctgtcccctcgtgaatgtgtctcatgtccccagtggggtttttcagtgagggtcatggtctccaggatgcacaaggctttgtgccagaattgcttggaattgcctagttctggaaggctggttggccaactctggcctccggcttttcctttgggaatttcccttgaaggtggggttggtagacagatccaggctcaccagtcctgtgccactgggcttttggcgttctgcacaaggcctacccgcagatgccatgcctgctcccccagcctaatgggctttgatgggggaagagggtggttcagcctctcacgatgaggaggaaagagcaagtgtcctcctcggacattctccgggttgtgaaatgtgctcgcaggaggcttttcaggcacagaggagccagctggtcgagctgctggtctcagggtccctggaaggcttcgagagtgtcctggactggctgctgtcctgggaggtcctctcctgggaggactacgagggcttccacctcctgggccagcctctctcccacttggccaggcgccttctggacaccgtctggaataagggtacttgggcctgtcagaagctcatcgcggctgcccaagaagcccaggccgacagccagtcccccaagctgcatggctgctgggacccccactcgctccacccagcccgagacctgcagagtcaccggccagccattgtcaggaggctccacagccatgtggagaacatgctggacctggcatgggagcggggtttcgtcagccagtatgaatgtgatgaaatcaggttgccgatcttcacaccgtcccagagggcaagaaggctgcttgatcttgccacggtgaaagcgaatggattggctgccttccttctacaacatgttcaggaattaccagtcccattggccctgcctttggaagctgccacatgcaagaagtatatggccaagctgaggaccacggtgtctgctcagtctcgcttcctcagtacctatgatggagcagagacgctctgcctggaggacatatacacagagaatgtcctggaggtctgggcagatgtgggcatggctggacccccgcagaagagcccagccaccctgggcctggaggagctcttcagcacccctggccacctcaatgacgatgcggacactgtgctggtggtgggtgaggcgggcagtggcaagagcacgctcctgcagcggctgcacttgctgtgggctgcagggcaagacttccaggaatttctctttgtcttcccattcagctgccggcagctgcagtgcatggccaaaccactctctgtgcggactctactctttgagcactgctgttggcctgatgttggtcaagaagacatcttccagttactccttgaccaccctgaccgtgtcctgttaacctttgatggctttgacgagttcaagttcaggttcacggatcgtgaacgccactgctccccgaccgaccccacctctgtccagaccctgctcttcaaccttctgcagggcaacctgctgaagaatgcccgcaaggtggtgaccagccgtccggccgctgtgtcggcgttcctcaggaagtacatccgcaccgagttcaacctcaagggcttctctgaacagggcatcgagctgtacctgaggaagcgccatcatgagcccggggtggcggaccgcctcatccgcctgctccaagagacctcagccctgcacggtttgtgccacctgcctgtcttctcatggatggtgtccaaatgccaccaggaactgttgctgcaggagggggggtccccaaagaccactacagatatgtacctgctgattctgcagcattttctgctgcatgccacccccccagactcagcttcccaaggtctgggacccagtcttcttcggggccgcctccccaccctcctgcacctgggcagactggctctgtggggcctgggcatgtgctgctacgtgttctcagcccagcagctccaggcagcacaggtcagccctgatgacatttctcttggcttcctggtgcgtgccaaaggtgtcgtgccagggagtacggcgcccctggaattccttcacatcactttccagtgcttctttgccgcgttctacctggcactcagtgctgatgtgccaccagctttgctcagacacctcttcaattgtggcaggccaggcaactcaccaatggccaggctcctgcccacgatgtgcatccaggcctcggagggaaaggacagcagcgtggcagctttgctgcagaaggccgagccgcacaaccttcagatcacagcagccttcctggcagggctgttgtcccgggagcactggggcctgctggctgagtgccagacatctgagaaggccctgctccggcgccaggcctgtgcccgctggtgtctggcccgcagcctccgcaagcacttccactccatcccgccagctgcaccgggtgaggccaagagcgtgcatgccatgcccgggttcatctggctcatccggagcctgtacgagatgcaggaggagcggctggctcggaaggctgcacgtggcctgaatgttgggcacctcaagttgacattttgcagtgtgggccccactgagtgtgctgccctggcctttgtgctgcagcacctccggcggcccgtggccctgcagctggactacaactctgtgggtgacattggcgtggagcagctgctgccttgccttggtgtctgcaaggctctgtatttgcgcgataacaatatctcagaccgaggcatctgcaagctcattgaatgtgctcttcactgcgagcaattgcagaagttagctctattcaacaacaaattgactgacggctgtgcacactccatggctaagctccttgcatgcaggcagaacttcttggcattgaggctggggaataactacatcactgccgcgggagcccaagtgctggccgaggggctccgaggcaacacctccttgcagttcctgggattctggggcaacagagtgggtgacgagggggcccaggccctggctgaagccttgggtgatcaccagagcttgaggtggctcagcctggtggggaacaacattggcagtgtgggtgcccaagccttggcactgatgctggcaaagaacgtcatgctagaagaactctgcctggaggagaaccatctccaggatgaaggtgtatgttctctcgcagaaggactgaagaaaaattcaagtttgaaaatcctgaagttgtccaataactgcatcacctacctaggggcagaagccctcctgcaggcccttgaaaggaatgacaccatcctggaagtctggctccgagggaacactttctctctagaggaggttgacaagctcggctgcagggacaccagactcttgctttgaagtctccgggaggatgttcgtctcagtttgtttgtgagcaggctgtgagtttgggccccagaggctgggtgacatgtgttggcagcctcttcaaaatgagccctgtcctgcctaaggctgaacttgttttctgggaacaccataggtcacctttattctggcagaggagggagcatcagtgccctccaggatagacttttcccaagcctacttttgccattgacttcttcccaagattcaatcccaggatgtacaaggacagcccctcctccatagtatgggactggcctctgctgatcctcccaggcttccgtgtgggtcagtggggcccatggatgtgcttgttaactgagtgccttttggtggagaggcccggcctctcacaaaagaccccttaccactgctctgatgaagaggagtacacagaacacataattcaggaagcagctttccccatgtctcgactcatccatccaggccattccccgtctctggttcctcccctcctcctggactcctgcacacgctccttcctctgaggctgaaattcagaatattagtgacctcagctttgatatttcacttacagcacccccaaccctggcacccagggtgggaagggctacaccttagcctgccctcctttccggtgtttaagacatttttggaaggggacacgtgacagccgtttgttccccaagacattctaggtttgcaagaaaaatatgaccacactccagctgggatcacatgtggacttttatttccagtgaaatcagttactcttcagttaagcctttggaaacagctcgactttaaaaagctccaaatgcagctttaaaaaattaatctgggccagaatttcaaacggcctcactaggcttctggttgatgcctgtgaactgaactctgacaacagacttctgaaatagacccacaagaggcagttccatttcatttgtgccagaatgctttaggatgtacagttatggattgaaagtttacaggaaaaaaaattaggccgttccttcaaagcaaatgtcttcctggattattcaaaatgatgtatgttgaagcctttgtaaattgtcagatgctgtgcaaatgttattattttaaacattatgatgtgtgaaaactggttaatatttataggtcactttgttttactgtcttaagtttatactcttatagacaacatggccgtgaactttatgctgtaaataatcagaggggaataaactgttgagtcaaaa

SEQ ID NO: 302 - DNA, 3581 bp, Homo sapiens
caaactctgtaagaactgcctgacagaaagctggactcaaagctcctacccgagtgtgcagcaggatcgccccggtccgggaccccaggcgcacaccgcagagtccaaagtgccgcgcctgccggccgcacctgcctgccgcggccccgcgcgccgccccgctgcccacctgcccgcctgcccacctgcccaggtgcgagtgcagccccgcgcgccggcctgagagccctgtggacaacctcgtcattgtcaggcacagagcggtagaccctgcttctctaagtgggcagcggacagcggcacgcacatttcacctgtcccgcagacaacagcaccatctgcttgggagaaccctctcccttctctgagaaagaaagatgtcgaatgggtattccacagacgagaatttccgctatctcatctcgtgcttcagggccagggtgaaaatgtacatccaggtggagcctgtgctggactacctgacctttctgcctgcagaggtgaaggagcagattcagaggacagtcgccacctccgggaacatgcaggcagttgaactgctgctgagcaccttggagaagggagtctggcaccttggttggactcgggaattcgtggaggccctccggagaaccggcagccctctggccgcccgctacatgaaccctgagctcacggacttgccctctccatcgtttgagaacgctcatgatgaatatctccaactgctgaacctccttcagcccactctggtggacaagcttctagttagagacgtcttggataagtgcatggaggaggaactgttgacaattgaagacagaaaccggattgctgctgcagaaaacaatggaaatgaatcaggtgtaagagagctactaaaaaggattgtgcagaaagaaaactggttctctgcatttctgaatgttcttcgtcaaacaggaaacaatgaacttgtccaagagttaacaggctctgattgctcagaaagcaatgcagagattgagaatttatcacaagttgatggtcctcaagtggaagagcaacttctttcaaccacagttcagccaaatctggagaaggaggtctggggcatggagaataactcatcagaatcatcttttgcagattcttctgtagtttcagaatcagacacaagtttggcagaaggaagtgtcagctgcttagatgaaagtcttggacataacagcaacatgggcagtgattcaggcaccatgggaagtgattcagatgaagagaatgtggcagcaagagcatccccggagccagaactccagctcaggccttaccaaatggaagttgcccagccagccttggaagggaagaatatcatcatctgcctccctacagggagtggaaaaaccagagtggctgtttacattgccaaggatcacttagacaagaagaaaaaagcatctgagcctggaaaagttatagttcttgtcaataaggtactgctagttgaacagctcttccgcaaggagttccaaccatttttgaagaaatggtatcgtgttattggattaagtggtgatacccaactgaaaatatcatttccagaagttgtcaagtcctgtgatattattatcagtacagctcaaatccttgaaaactccctcttaaacttggaaaatggagaagatgctggtgttcaattgtcagacttttccctcattatcattgatgaatgtcatcacaccaacaaagaagcagtgtataataacatcatgaggcattatttgatgcagaagttgaaaaacaatagactcaagaaagaaaacaaaccagtgattccccttcctcagatactgggactaacagcttcacctggtgttggaggggccacgaagcaagccaaagctgaagaacacattttaaaactatgtgccaatcttgatgcatttactattaaaactgttaaagaaaaccttgatcaactgaaaaaccaaatacaggagccatgcaagaagtttgccattgcagatgcaaccagagaagatccatttaaagagaaacttctagaaataatgacaaggattcaaacttattgtcaaatgagtccaatgtcagattttggaactcaaccctatgaacaatgggccattcaaatggaaaaaaaagctgcaaaagaaggaaatcgcaaagaacgtgtttgtgcagaacatttgaggaagtacaatgaggccctacaaattaatgacacaattcgaatgatagatgcgtatactcatcttgaaactttctataatgaagagaaagataagaagtttgcagtcatagaagatgatagtgatgagggtggtgatgatgagtattgtgatggtgatgaagatgaggatgatttaaagaaacctttgaaactggatgaaacagatagatttctcatgactttattttttgaaaacaataaaatgttgaaaaggctggctgaaaacccagaatatgaaaatgaaaagctgaccaaattaagaaataccataatggagcaatatactaggactgaggaatcagcacgaggaataatctttacaaaaacacgacagagtgcatatgcgctttcccagtggattactgaaaatgaaaaatttgctgaagtaggagtcaaagcccaccatctgattggagctggacacagcagtgagttcaaacccatgacacagaatgaacaaaaagaagtcattagtaaatttcgcactggaaaaataaatctgcttatcgctaccacagtggcagaagaaggtctggatattaaagaatgtaacattgttatccgttatggtctcgtcaccaatgaaatagccatggtccaggcccgtggtcgagccagagctgatgagagcacctacgtcctggttgctcacagtggttcaggagttatcgaacatgagacagttaatgatttccgagagaagatgatgtataaagctatacattgtgttcaaaatatgaaaccagaggagtatgctcataagattttggaattacagatgcaaagtataatggaaaagaaaatgaaaaccaagagaaatattgccaagcattacaagaataacccatcactaataactttcctttgcaaaaactgcagtgtgctagcctgttctggggaagatatccatgtaattgagaaaatgcatcacgtcaatatgaccccagaattcaaggaactttacattgtaagagaaaacaaagcactgcaaaagaagtgtgccgactatcaaataaatggtgaaatcatctgcaaatgtggccaggcttggggaacaatgatggtgcacaaaggcttagatttgccttgtctcaaaataaggaattttgtagtggttttcaaaaataattcaacaaagaaacaatacaaaaagtgggtagaattacctatcacatttcccaatcttgactattcagaatgctgtttatttagtgatgaggattagcacttgattgaagattcttttaaaatactatcagttaaacatttaatatgattatgattaatgtattcattatgctacagaactgacataagaatcaataaaatgattgttttactctgcattgaa

SEQ ID NO: 303 - DNA, 4587 bp, Homo sapiens
gtcatagaagactactcggagagcgctgcctctgggttggcgggctggcaggctgtagccgagcgcgggcaggactcgtcccggcagggttccagagccatgggagcggaaaggaggctgctgtcgattaaggaggcctttcggctggcgcagcagccgcaccagaaccaggcgaagctggtggtggcgctgagccgcacctaccgcacgatggatgataagacagtttttcatgaggagttcattcattaccttaaatatgttatggtggtctataaacgtgaaccagctgtggagagggtaatagaatttgcagcaaagtttgttacctcatttcaccaatcagatatggaagatgatgaggaagaggaagatggtggccttttaaattatttgtttacttttctcttaaagtctcatgaagcaaacagcaatgcagtgagatttagagtgtgcctgctcataaacaagcttttgggaagtatgccagaaaatgctcagattgatgatgatgtgtttgataaaattaataaagccatgcttattagattgaaagataagattccaaatgtgagaatacaggcagttctggcgctttcacgacttcaggatcccaaggatgatgaatgcccagtggttaatgcatatgctactttgattgaaaatgattcaaatccagaagttagacgggcagtgttatcatgtattgcaccatcagcaaagactttgccaaaaattgtagggcgcaccaaggatgtgaaagaggctgtcagaaagctggcttatcaggttttagctgaaaaggttcatatgagagctatgtccattgctcagagagtaatgctccttcaacaaggtcttaatgacagatcagatgctgtgaaacaagctatgcagaagcatcttcttcaaggctggttacggttctctgaaggaaatatcttagagttgctccatcggttggatgtagaaaattcttctgaagtggcagtctctgttctcaatgccttgttttcaataactcctctcagtgaactggtgggactctgtaaaaacaatgatggcaggaaattgattccagtggaaacattaactcctgaaattgctttgtattggtgtgccctttgtgaatatttgaaatcaaaaggagatgaaggtgaagaatttttagagcagattttgccagagcctgtagtatatgcagactatttattgagttacatccagagcattccagttgttaatgaagaacacagaggtgatttttcctatattggaaatttgatgacaaaagaattcataggtcaacaattgattctaattattaagtctttggataccagtgaagaaggaggaagaaaaaaactgctggctgttttacaggagattcttattttacccacaatcccaatatccctggtttcttttcttgttgaaagactactccacatcattatagatgataataagagaacacaaattgttacagaaattatctcagagattcgggcgcccattgttactgttggtgttaataacgatccagctgatgtaagaaagaaagaactcaagatggctgaaataaaagttaagcttatcgaagccaaagaagctttggaaaattgcattaccttacaggattttaatcgggcatcagaattaaaagaagaaataaaagcattagaagatgccagaataaaccttttgaaagagacagagcaacttgaaattaaagaagtccacatagagaagaatgatgctgaaacattgcagaaatgtcttattttatgctatgaactgttgaagcagatgtccatttcaacaggcttaagtgcaaccatgaatggaatcatcgaatctttgattcttcctggaataataagtattcatcctgttgtaagaaacctggctgttttatgcttgggatgctgtggactacagaatcaggattttgcaaggaaacacttcgtattactattgcaggttttgcaaattgatgatgtcacaataaaaataagtgctttaaaggcaatctttgaccaactgatgacgttcgggattgaaccatttaaaactaaaaaaatcaaaacacttcattgtgaaggtacagaaataaacagtgatgatgagcaagaatcaaaagaagttgaagagactgctacagctaagaatgttctgaaactcctttctgatttcttagatagtgaggtatctgaacttaggactggagctgcagaaggactagccaagctgatgttctctgggcttttggtcagcagcaggattctttctcgtcttattttgttatggtacaatcctgtgactgaagaggatgttcaacttcgacattgcctaggcgtgttcttccccgtgtttgcttatgcaagcaggactaatcaggaatgctttgaagaagcttttcttccaaccctgcaaacactggccaatgcccctgcatcttctcctttagctgaaattgatatcacaaatgttgctgagttacttgtagatttgacaagaccaagtggattaaatcctcaggccaagacttcccaagattatcaggccttaacagtacatgacaatttggctatgaaaatttgcaatgagatcttaacaagtccgtgctcgccagaaattcgagtctatacaaaagccttgagttctttagaactcagtagccatcttgcaaaagatcttctggttctattgaatgagattctggagcaagtaaaagataggacatgtctgagagctttggagaaaatcaagattcagttagaaaaaggaaataaagaatttggtgaccaagctgaagcagcacaggatgccaccttgactacaactactttccaaaatgaagatgaaaagaataaagaagtatatatgactccactcaggggtgtaaaagcaacccaagcatcaaagtctactcagctaaagactaacagaggacagagaaaagtgacagtttcagctaggacgaacaggaggtgtcagactgctgaagccgactctgaaagtgatcatgaagttccagaaccagaatcagaaatgaagatgagactaccaagacgagccaaaaccgcagcactagaaaaaagtaaacttaaccttgcccaatttctcaatgaagatctaagttaggaaagacgatggaggtggaatcctttaagattatgtccagttatttgctttaataaagaagaagttacccttgtcaaaatcagaacaaacctgatgtctttctgaagattttctgctgtgcgcttccacgttactttggcctgtattaaagcagtagagcagcatcagttattatagtccagaaaaagtgtgcatcagtcagtcacacagatttatcacaatctgaggtgggcctaggaatctcatttttaaatagtctctccaagtgattcttatgaactctttatgtttaaaatcatgtcattatggaaaacttacaagtgtaactagctagtagcttgcatttgagaagcttatgacttagatgggcagaatcaacaaagatgaaaccgcctgaggacacatttaacaagtaacatttctagggaaaatgaaggaagtaccacaaactggctagaaaggagcttatcaatcaccagtgaggaagaccagtataacgttcaacaacagttattttgacaaaaacttattttgtgattcctacagtgaaaacatttttggtgatatctgcctgggaaatctctcttcctaaagtatttgtatatgggagtccttgtttgtgaatgtttcctggattagggaggtgtcaacataaatgtattattaaccatgaagctgctcgctatatttttggcataacaaaataatatttatttactgtggataataattctagtgggaatataatgtgacaggaacttctctttatatacgctaccaatttatgagcactattcactgtcaatttcatttcttgtcttttgaaattgacacttggcctgacttacgaaacttgtactatatgaaattggtcctcttttctgcaatacccaacgaaacaccttttctctttattattcagaaatgtcctaacatggatctgtttgttttaataattgtgctttttttaggcttatcatctactagaggccatttacttaaggtgaaattttaagatggagctaaagtaagatcactggtttttagaaccaaattgctatacatatgtgcctcatagaacttataaaaggagtcaaagtttcaaagcaagatagttattaagcaaaaggaaaaatggtaatgatagaaagtcagttaaaaatagatgattgttcttcattctgtttgttggctctgtgttctcctgtgcttcagattccttatgtgttgttgttttaaagacaatttgcagggggttgggagaaggactgaaaaggtacattaagtgtgctgtaaggaaaagtcttagaaacataataagctaaaatcccattcacacatggccaggctatccaaaaagaaaggagccatgttctcatgtggtttaccataccaaagcttgctttctctggcatgggaaaaataaatttaagcaccaaa

SEQ ID NO: 304 - DNA, 4403 bp, Homo sapiens
ctccttccagaacgtcccgggctcctgccgagtcagaagaaatgggactccctccgcgacgtgcccggagcagctcccttcgctgtggaagcggcggtgtcttcgaagaaaccggaagcccgtggtgacccctggcgacccggtttgttttcggtccgtttccaaacactaaggaatcgaaactcggcggccttgggggcggccctacgtagcctggcttctggttgtcatggatgcactggtagaagatgatatctgtattctgaatcatgaaaaagcccataagagagatacagtgactccagtttcaatatattcaggagatgaatctgttgcttcccattttgctcttgtcactgcatatgaagacatcaaaaaacgacttaaggattcagagaaagagaactctttgttaaagaagagaataagatttttggaagaaaagctaatagctcgatttgaagaagaaacaagttccgtgggacgagaacaagtaaataaggcctatcatgcatatcgagaggtttgcattgatagagataatttgaagagcaaactggacaaaatgaataaagacaactctgaatctttgaaagtattgaatgagcagctacaatctaaagaagtagaactcctccagctgaggacagaggtggaaactcagcaggtgatgaggaatttaaatccaccttcatcaaactgggaggtggaaaagttgagctgtgacctgaagatccatggtttggaacaagagctggaactgatgaggaaagaatgtagcgatctcaaaatagaactacagaaagccaaacaaacggatccatatcaggaagacaatctgaagagcagagatctccaaaaactaagcatttcaagtgataatatgcagcatgcatactgggaactgaagagagaaatgtctaatttacatctggtgactcaagtacaagctgaactactaagaaaactgaaaacctcaactgcaatcaagaaagcctgtgcccctgtaggatgcagtgaagaccttggaagagacagcacaaaactgcacttgatgaattttactgcaacatacacaagacatccccctctcttaccaaatggcaaagctctttgtcataccacatcttcccctttaccaggagatgtaaaggttttatcagagaaagcaatcctccaatcatggacagacaatgagagatccattcctaatgatggtacatgctttcaggaacacagttcttatggcagaaattctctggaagacaattcctgggtatttccaagtcctcctaaatcaagtgagacagcatttggggaaactaaaactaaaactttgcctttacccaaccttccaccactgcattacttggatcaacataatcagaactgcctttataagaattaatttggaagagattcacgatttcaccatgaggacacttatctctttcagtggtcctcccaagaaattatttaacaaactgaaaggagattttgattaaaattttgcagaggtcttcagtatctatatttgaacacactgtacaatagtacaaaaaccaacatagttggttttctagtatgaaagagcaccctctagctccatattctaagaatctgaaatatgctactatactaattaataagtaaacttaaggtgtttaaaaaactctgccttctatattaattgtaaaattttgcctctcagaagaatggaattggagattgtagacgtggttttacaaaatgtgaaatgtctaaatatctgttcataaaaataaaaggaaaacatgtttcttcaaattgcataatggaacaaatggcaatgtgagtaggttacatttctgttgttataatgcgtaaagatattgaaaatataatgaaataaaagcatcttaggttataccatctttatatgctattgcgtttcaatatttaagatttaaagtgattttttggtcacagtgttttgttgataaaatttttttagaattgaagtttgaattctaagacttgaaacaacctgatcactgaagccaactttgtcccagcacattccttaagtcctaattgggaaaaaaaaaaaaaaaaatgaaatagttgaaaaactctggggtgtaaacaaatgattgtaaccctacacactattcaataagtagtagaaggagcatcacacagatttcagtctaatctgcccttctgtgggccataatataaacataaatgtgtgtaatgataaaaagtcattttcttcaaagagactacagctagctgcacattgtgtagagcagcttctaaattgttagactttgtgttgaaatgtaatattctatttattgagaaagtgatttaaaattattatttttaatcatagaaatcagggtttgggctgtattgatattgtcgatcatgaaatgtccacacttattctaagtggccaattatttggaaataaagaaggaaataaagatggcttcacatggaaatttaagttctttcagggtggagatttacttggttcatacaccttttgcctgaattaaagtatttcatgtaggaggacttttatcctttttgatagacagtttcatatatcttgaactcaatatctcagatctcttctactgtattactgaatagcatacatacatagacaatgttcgccattcactagatatttttttctattatcttacacttattcaagcttgtctgtgattaatggaattggtgtcagatgctggaatttattctgaccaatgaacacagctgactcaggggagtacaatctcctgccaagtaatagaaccaaacccaatatgcataaaagaaatacaatactccaggctttagctgaaggaagcaactacctgtgtaataacaaagcagcaaaaactatttctcatgtggctgcataggctgtatattatatctgatctctaatgtagcttactggtttgccttttttaaaaccaaaattggaaattttcctttgtaaagaaaaaaagtcttatgagataattgcttgattaatgttttgaacaataccaagaaattgtttaattaaaataaatatttttgtttgaaattgaagtggatgtgaaatattgtccttgcctatagatctcaaaatctagtactaattgttggttgttaatatgattcatacaatagacatttgttaaaccagcttttgagtggagaaaattattttccatttaaacagtacagtgatgatagctatcaaacaggtatactaaaaagtcagtgactgtgacagtttaaagtgttagacaaatgatgtataaggttctttagtaaggaaagattagccaaaaattttttacccagctagaagcttttaaatctacacttgatatctctgttctaggtaaaattcaaacaaccaaaaaacagtggcccatctgtagcttatgaatctatttaaaattgaatattttatgttgacttctttcatactagctgaaacttgctctaaagagcttcctttggaatctttagatttctttttataaggttcaattcagtacatccataaatcgacagaatgaagaaaacataacaaaaagccacctattccttcctcttgctcccttattagctaaagtaaaatttacatctgtaagacttactgagttgctgccaaaatggaactgaattcttaaaagcaggaacatgcctatgtgaaacattagaaaaccaaaataaatgggaaaattcagacttgaagagctgaatcatgtgacaacaaagtactgatcttaattcagaaaggctacttggagaaggtgtatcttaaggggtaaaaaacctgtgggttaccacatattaacagggaataatatcaacagaggcacccataagcaagcaagacacaactgagacagatgtaccaggtgaaaaaaatcttcagtatggatacacatgggtattctgaaggctacaatgaatggtttagtctttgacataaggaggatgaacatattatttatactgtgtaatctaatctggcttctatggggaaagcaacatgtacataagtgaattttctacatgaagtgggctacttctgattttaatcaaagctataaaatagattgtatatttcactagcttcttaaagtaactcttccattttcatttatctctaaaaacagttaacttcctgtgctctaggaaatgcaccaataccaaaggtcaatgtggaaatatgggcatgtttgcccctatgctgtgtggtctctagatttctatatttgctttgcttttgtctgctctagtaatctccctccttttgatctgtggcctgggaaaatgtggtttctttgtatttcaaataaaagtaaaatagttttttgagtggttcactcaagagtaaa

SEQ ID NO: 305 - DNA, 3021 bp, Homo sapiens
gtttcccgccggcgtctccaccctgcgagagccgcccgccagccagcgtccgccgccgtccgcgtcgcgccacccgcggtccgacgggagcaggcccagcggccatggcccaggccggcgtcgtcggtgaggtcacccaggtgctgtgcgcggccgggggcgccctggagttgcccgagctgcggcgccgcttgcggatgggcttgagcgccgacgcgctggagcggctgctgcggcagcgtgggcgcttcgtggtggcggtgcgggcgggcggcgcagccgcggccccggagcgcgtggtgctggccgcctcgccgctgcgcctgtgtcgcgcgcaccagggctccaagccgggctgcgtggggctctgcgcgcagctccacctctgcaggttcatggtctacggcgcctgcaagttcctgagagccgggaagaactgtaggaatagtcacagcttgacaaccgaacacaacctgagtgtgctgagaactcatggcgttgaccacctgagctataatgagctatgccaactcttgtttcagaacgacccctggcttttgccagaaatttgccaacattacaacaaaggagatggaccccacggctcttgtgcctttcaaaagcagtgcatcaagctccatatctgccagtattttttacagggggaatgcaagtttggcactagctgtaagagatcccatgatttctctaattctgagaatctggaaaaattggagaagttgggtatgagctcagacctggtgagcaggctgcctaccatttatagaaatgcacatgacatcaagaataagagctctgcccccagcagagtgcctcctctttttgtcccacaggggacttctgaaagaaaagacagttcaggttctgtgtccccaaacactcttagccaggaggagggtgatcagatctgtttgtaccatatccggaaaagttgtagctttcaagataagtgccatagagttcatttccatttgccgtatcgatggcaattcttggatagaggcaaatgggaggatttggacaacatggaacttattgaagaggcatattgcaatcccaaaatagaaaggatcctgtgctctgagtcagccagtacctttcactctcattgtctgaactttaacgccatgacttacggtgctacccaggctcgccgcctctccacggcctcctctgtcaccaaacctccacacttcatcctcaccactgactggatttggtactggagtgatgagtttggttcttggcaggaatatggaagacagggcacggtgcaccctgtgaccactgtcagcagtagcgacgtggagaaggcctacctggcctactgtacaccggggtctgacggccaggcagccaccttgaagttccaggccggaaagcacaactacgagttagatttcaaagccttcgttcagaaaaacctggtctatggcacaactaaaaaggtttgccgcagacccaaatacgtgtctccccaggatgtgacgaccatgcaaacctgcaataccaagtttccaggcccgaagagcatcccagactattgggactcctctgccctgccagacccaggctttcagaagatcacccttagttcttcctcggaagagtatcagaaggtctggaacctctttaaccgcacgctgcctttctactttgttcagaagattgagcgagtacagaacctggccctctgggaagtctaccagtggcaaaaaggacagatgcagaagcagaacggagggaaggccgtggacgagcggcagctgttccacggcaccagcgccatttttgtggacgccatctgccagcagaactttgactggcgggtctgtggtgttcatggcacttcctacggcaaggggagctactttgcccgagatgctgcatattcccaccactacagcaaatccgacacgcagacccacacgatgttcctggcccgggtgctggtgggcgagttcgtcaggggcaatgcctcctttgtccgtccgccggccaaggagggctggagcaacgccttctatgatagctgcgtgaacagtgtgtccgacccctccatctttgtgatctttgagaaacaccaggtctacccagagtatgtcatccagtacaccacctcctccaagccctcggtcacaccctccatcctgctggccttgggctccctgttcagcagccgacagtgagcgcacaggagtgttccaggcctttcacctgctctgccttgaaatggctatttgggcctttccttttctttttaaacagaaacttttaatgaactgttctcttaacattgacctctcaatgaagttatgttcttaatctcttgctaataatgatttttacttttaagtcacttttgggttcactagtggattaaccagaagtgattgtagttgagtccagttttgctttttaataatgtgttgaagttttagtttttactctttgttgactttgctgcttattggcaccagggacagagtttctagatacaattttatggattggttttaatttttatgagtttgtctctgcagtgattcggtttctcagagtctcatggcatcatagtttttccagaatgacacagtagccaccggtggatgacagcccacgggcggcacagtcacttctgcctgttgctctgacaccaacccaggcagctctgctgtggcttctcctgggctctggcattagttggtctgtgtcacattgtcagaacaggtggctgctgtgtggtgccatcgagtccctgctggttccccttgtcctgggagggtcacccattgcccaaggaagtgcatccacctggcaggtgacctggaggagtagcttccccgaggacccccaggcttggcctgtgattgcgcaaacccacatttcctaagcacactggacacccttcgagtgtgggttttaacatccctgtgagattgaatacttgtgccacacatgtcacaaaagagtatggaaataaaagaaaatttatccgaa

SEQ ID NO: 306 - DNA, 1673 bp, Homo sapiens
gcacttccgctggcccaagtgatctgcatgtggcagggctgcgcagtggagcggccagtgggcaggatgacgagccagacccctctgccccagtccccccggcccaggcggccaacgatgtctactgttgtggagctgaacgtcgggggtgagttccacaccaccaccctgggtaccctgaggaagtttccgggctcaaagctggcagagatgttctctagcttagccaaggcctccacggacgcggagggccgcttcttcatcgaccgccccagcacctatttcagacccatcctggactacctgcgcactgggcaagtgcccacacagcacatccctgaagtgtaccgtgaggctcagttctacgaaatcaagcctttggtcaagctgctggaggacatgccacagatctttggtgagcaggtgtctcggaagcagtttttgctgcaagtgccgggctacagcgagaacctggagctcatggtgcgcctggcacgtgcagaagccataacagcacggaagtccagcgtgcttgtgtgcctggtggaaactgaggagcaggatgcatattattcagaggtcctgtgttttctgcaggataagaagatgttcaagtctgttgtcaagtttgggccctggaaggcggtcctagacaacagcgacctcatgcactgcctggagatggacattaaggcccaggggtacaaggtattctccaagttctacctgacgtaccccaccaaaagaaacgaattccattttaacatttattcattcaccttcacctggtggtgatcctcaggagcagagactgttatgaattctggcgtggcttatgaaattaaaagttgccatcaaagccattttcttttaatttcacaaacatcaggcaatttccagggttggtctagagtcttgccactaaatattgatcactcgtttaaggactttccactccattgcaactgatgccactatatttgcctagcaacttgcagctacttccttttcaaagcctcatgtatctcccagacccttctcttgaagtccaataacaagaccaagtaagaatgtttcaacaatgcgttggcaagagatgtgagatgacaacaggaacatacaagatactgtgaatctagatgttctgacctaaagatgtagtctacatagccccagcttggggtccaatccatctgtccctggcatgtgccttcatgtagtaggtgctttcctgatcccctttgcgagatgctgtgggtgctaacacctcagagctgtcctcttctctagagtggaggttttcaaagtgcatcatcagcattacctgtgaacttgctggaaatacaaatcctcaggccccacctcagacctactgaatcagaatctctgggggttggcacagcattctgatttaccaaaccctccaagtgattttgatgtattctaattttgagaccatctctagaaaagaattgctacctcttgtatggaggtacaaaagactgacctcttacatcaaggaacttcctttcccagagctcctcatggaatcaagctgaagtcagtcttcttctgagagcacattcttactcagtttttttcctctgtcctacgctgcttccctcactccccttctcctaagagcactccatcaataaaccacttgcacgaga

SEQ ID NO: 307 - DNA, 2591 bp, Homo sapiens
gatttctgctctctgcgctgagcacagcggcaccaggctgagctaagcagggccgccttgggcaggcctacgtggtggtgcaggcgagacccaggctgggcaaggcgcagtttcagtttccatcttgggtctctgagctgagcagagtggcaccaggctgagttaagtgggactgccctgggcagacctacctactagagcagaatggagcttcggtcctaccaatgggaggtgatcatgcctgccctggagggcaagaatatcatcatctggctgcccacgggtgccgggaagacccgggcggctgcttatgtggccaagcggcacctagagactgtggatggagccaaggtggttgtattggtcaacagggtgcacctggtgacccagcatggtgaagagttcaggcgcatgctggatggacgctggaccgtgacaaccctgagtggggacatgggaccacgtgctggctttggccacctggcccggtgccatgacctgctcatctgcacagcagagcttctgcagatggcactgaccagccccgaggaggaggagcacgtggagctcactgtcttctccctgatcgtggtggatgagtgccaccacacgcacaaggacaccgtctacaacgtcatcatgagccagtacctagaacttaaactccagagggcacagccgctaccccaggtgctgggtctcacagcctccccaggcactggcggggcctccaaactcgatggggccatcaaccacgtcctgcagctctgtgccaacttggacacgtggtgcatcatgtcaccccagaactgctgcccccagctgcaggagcacagccaacagccttgcaaacagtacaacctctgccacaggcgcagccaggatccgtttggggacttgctgaagaagctcatggaccaaatccatgaccacctggagatgcctgagttgagccggaaatttgggacgcaaatgtatgagcagcaggtggtgaagctgagtgaggctgcggctttggctgggcttcaggagcaacgggtgtatgcgcttcacctgaggcgctacaatgacgcgctgctcatccatgacaccgtccgcgccgtggatgccttggctgcgctgcaggatttctatcacagggagcacgtcactaaaacccagatcctgtgtgccgagcgccggctgctggccctgttcgatgaccgcaagaatgagctggcccacttggcaactcatggcccagagaatccaaaactggagatgctggaaaagatcctgcaaaggcagttcagtagctctaacagccctcggggtatcatcttcacccgcacccgccaaagcgcacactccctcctgctctggctccagcagcagcagggcctgcagactgtggacatccgggcccagctactgattggggctgggaacagcagccagagcacccacatgacccagagggaccagcaagaagtgatccagaagttccaagatggaaccctgaaccttctggtggccacgagtgtggcggaggaggggctggacatcccacattgcaatgtggtggtgcgttatgggctcttgaccaatgaaatctccatggtccaggccaggggccgtgcccgggccgatcagagtgtatacgcgtttgtagcaactgaaggtagccgggagctgaagcgggagctgatcaacgaggcgctggagacgctgatggagcaggcagtggctgctgtgcagaaaatggaccaggccgagtaccaggccaagatccgggatctgcagcaggcagccttgaccaagcgggcggcccaggcagcccagcgggagaaccagcggcagcagttcccagtggagcacgtgcagctactctgcatcaactgcatggtggctgtgggccatggcagcgacctgcggaaggtggagggcacccaccatgtcaatgtgaaccccaacttctcgaactactataatgtctccagggatcctgtggtcatcaacaaagtcttcaaggactggaagcctgggggtgtcatcagctgcaggaactgtggggaggtctggggtctgcagatgatctacaagtcagtgaagctgccagtgctcaaagtccgcagcatgctgctggagacccctcaggggcggatccaggccaaaaagtggtcccgcgtgcccttctccgtgcctgactttgacttcctgcagcattgtgccgagaacttgtcggacctctccctggactgaccacctcattgctgcagtgcccggtttgggctgtagggggcgggagagtctgcagcagactccaggcccctccttcctgaatcatcagctgtgggcatcaggcccaccagccacacaggagtcctgggcaccctggcttaggctcccgcaatgggaaaacaaccggagggccagagcttagtccagacctaccttgtacgcacatagacattttcatatgcactggatggagttagggaaactgaggcaaaagaatttgccatactgtactcagaatcacgacattccttccctaccaaggccacttctattttttgaggctcctcataaaaataaatgaaaaaatggga

SEQ ID NO: 308 - DNA, 1889 bp, Homo sapiens
atccctctgcagagcccggggtcaccaggaggagacgccatgacccccaccctcgcagccctgctctgcctagggctgagtctgggccccaggacccacgtgcaggcagggcccttccccaaacccaccctctgggctgagccaggctctgtgatcagctgggggagccccgtgaccatctggtgtcaggggagcctggaggcccaggagtaccgactggataaagagggaagcccagagccctgggacagaaataacccactggaacccaagaacaaggccagattctccatcccatccataacagagcaccatgcggggagataccgctgccactattacagctctgcaggctggtcagagcccagcgaccccctggagctggtgatgacaggagcctatagcaaacccaccctctcagccctgcccagccctgtggtggcctcaggggggaatatgaccctccaatgtggctcacagaagggatatcaccattttgttctgatgaaggaaggagaacaccagctcccccggaccctggactcacagcagctccacagtggggggttccaggccctgttccctgtgggccccgtgaaccccagccacaggtggaggttcacatgctattactattatatgaacaccccccgggtgtggtcccaccccagtgaccccctggagattctgccctcaggcgtgtctaggaagccctccctcctgaccctgcagggccctgtcctggcccctgggcagagcctgaccctccagtgtggctctgatgtcggctacgacagatttgttctgtataaggagggggaacgtgacttcctccagcgccctggccagcagccccaggctgggctctcccaggccaacttcaccctgggccctgtgagcccctcccacgggggccagtacaggtgctatggtgcacacaacctctcctccgagtggtcggcccccagcgaccccctgaacatcctgatggcaggacagatctatgacaccgtctccctgtcagcacagccgggccccacagtggcctcaggagagaacgtgaccctgctgtgtcagtcatggtggcagtttgacactttccttctgaccaaagaaggggcagcccatcccccactgcgtctgagatcaatgtacggagctcataagtaccaggctgaattccccatgagtcctgtgacctcagcccacgcggggacctacaggtgctacggctcatacagctccaacccccacctgctgtctttccccagtgagcccctggaactcatggtctcaggacactctggaggctccagcctcccacccacagggccgccctccacacctgcctcacacgccaaggattacacagtggagaatctcatccgcatgggcatggcaggcttggtcctggtgttcctcgggattctgttatttgaggctcagcacagccagagaaacccccaagatgcagccgggaggtgaacagcggagaggacaatgcacccttcagcgtggtggagcctcagggacagatctgatgatcccagaaggctctggaggacaatctaggacctccagaggggggtgagatttcaggccacacactgtggaaggtaatcatgtctgatcacaaattttgggtctccaccttacttccaatctatgttgtgaatgcccagttgagacccacggaaaagagctcatgggtgagtgtgaagtgcttctctgtcttaagttcccagagatccttgcctcttggaggccagcaaacactaactcttgaggaattcatgacaatatcatctgattcctccttcccagcttgtatggcagtctcccaccctcatgtgttcaatctgatgatcccaggaggttctggaacaaaa

SEQ ID NO: 309 - DNA, 3000 bp, Homo sapiens
agtggcagtcaggcctccccgctctgtgctacctgcggcccggctctcctccgcgcccccactcgcgctgcgatgacgcgctcactgttcaagggaaacttttggagtgcagacatcctcagcaccatcggctatgacaacattatccaacatctgaacaatggccgcaagaactgcaaagagtttgaagactttctaaaagaaagggcagcaattgaagagaggtatggcaaagatctgctcaacctctctaggaagaagccgtgtggacagtctgaaatcaacaccctgaagcgggcccttgaagtcttcaagcagcaagtagacaatgtggcacaatgtcacattcagcttgcacagagtttaagagaagaggccaggaagatggaagaattcagggaaaagcaaaaactacaacgaaaaaagacagagctcataatggatgctatccataaacaaaagagcttacaattcaagaaaaccatggatgcaaagaagaactatgagcagaaatgccgggacaaagatgaggcagaacaggccgtcagccggagtgccaacctggtgaacccgaagcaacaagaaaagctttttgtgaaactggcaacttcaaagaccgcagtagaggactcagacaaagcatacatgctgcacatcggcaccctggataaggtccgagaagagtggcagagtgagcacatcaaggcctgcgaggcatttgaggctcaagaatgtgaacgaataaacttcttccggaatgcattgtggttacatgtgaatcagctgtcacaacaatgtgtcaccagtgatgaaatgtacgaacaagtccgaaagagtttagaaatgtgcagcattcagagggacattgaatactttgtgaatcaacgcaaaactggacagattccaccagcacccatcatgtatgagaatttctactcctcccagaagaatgcagtcccagcaggaaaggctacagggcctaacttggcaaggagaggacccctcccaattcctaaaagctcaccagatgatcccaattactctttggttgatgactacagtttgctctatcagtaaaatcaatgaaaccagagctttttccggctagtgcttctgtgatatggaaagggcacccagagcagcaggacctatagccacgttatgtcagcaatgaagactttgaagtgaacccttgctataattttttagagatttaaaatttatggtagacatttaggacaacataagcaagtagagttctgcagttttttgaagtttacaaattgccccattctgaagaattattctttcccagttactcaggttatgaatgaattaggttttcaacatgggaagcatgaaatccacttctggatttggagcatccacttgaggagcagaggtggcagcagaggattctgagccaccaactgcagtagtggctcctttggctttgggcagcctggctgtggagtttccacggcgacacacagcctcagtggtgcaagatttaaaattaccttcctttttggctggaagacttagaagccgcctgatcatactttctcattttacagatgaggaaataaagcctacaagtgtgaaattaatttccttacagttttcctagctgatgagggacagaaccagaactagagcctgagcccaacccacatcactattcttctaacccttcctgaagttgtgatgctcatgctgaaatttaagatgccaaatatttttgccagcactttttcagttgggagaatcaccagggtttaaatgtcagatttatttttatgtggatccctgtgtatgctgaactacagagcatgatgtttaatctaatttaaggagccactgattgtaaaacatgccattattttatgttgcactaagaaggtggggtcgaggagttgccaataaacttgggacagactattgatggccaagcccatctgaatttaagatgctaaagtatgaaaaaaatacatcttagaatcaatgaaataccatattttgattccattcctcaagataattttagagttataaaaccagtcctcaattttgggtcttcacagagaatctttcccttgctagaccccagaattttaaatgcatccgtcttacactttcacaaatatttgggttttcctttttcactcacaaacagcagggaggtcatgtactttttgtacaacacctgtgcactatgagaaaatggtaccttttagttattgacaagttaaaatagcactctcagtttttcagtattacagagagcaaatagtttcctctcctgctctgtgcagtagcttttccagaactatggacaaattgatcagaagaagattgattatttcctcatctttttttcttttttttgagacagagtctctctctgtcccccaggctgaagtgcagcggcatgatctcagctcactgcaacctctgcctcccgggttcaagtgattctcctgcctcagcctcctgagtagctgggattacaggcacccaccaccacacctggctaattttttgtatttttagtaaagacagggttttaccatgttggtcaggctggtctcaaactcctgacctcaggtgatccacctgcctcggcctcccaaagtgctgggattacaggcgtgagccactgcgcccggcctatttccccacctttcgtgtaaggtgctactgaacatgacagcttcttgtcatgacaggaaacttgcatcagttggatatccttttgagaaactgaattttgcaaagggccaaatttccccaaactgaacgggctcaggaaatgttcctttacactcagaacattctattttaagtatattatttattgttggcagttcctcagggatttcccttttctctgtattggtcagtgtagttgatgtaaaaccgttttgtggatggaaaatatttttattttattgctcttttagtttggtaggttaaataaaggttcttggtaatttggga

SEQ ID NO: 310 - DNA, 3615 bp, Homo sapiens
ccccgaggagccaccgcccagccgctcgcaggcgccgcacggagttgcgtcccggggacttggggccgcagggagctgtgagtacccaggaagctgcaccgtgtggcctggagctgtctatctgtccttccagccacctgtctgtccagccacccttccacagactgaggcttgacaccggagcatctgtacagagcaaggagaagacaagaacatgctctaaagcccttcacagcaagacccaggaagccgcgggcaaactcagactcgaagccctcccgcctcctgcccacaatggcctctgctgacaagaatggcgggagcgtgtcctctgtgtccagcagccgcctgcagagccggaagccacccaacctctccatcaccatcccgccacccgagaaagagacccaggcccctggcgagcaggacagcatgctgcctgagggttttcagaataggaggctaaagaaaagccagcccaggacctgggctgcacacaccaccgcctgccctccctccttcctccccaagaggaagaacccagcctacttgaagagcgtcagcctccaggagccacgcagccgatggcaggagagttcagagaagcgccctggcttccgccgccaggcctcactgtcccagagcatccgcaagggcgcagcccagtggtttggagtcagcggcgactgggaggggcagcggcagcagtggcagcgccgcagcctgcaccactgcagcatgcgctacggccgcctgaaggcctcgtgccagcgtgacctggagctccccagccaggaggcaccgtccttccagggcactgagtccccaaagccctgcaagatgcccaagattgtggatccgctggcccggggccgggccttccgccacccggaggagatggacaggccccacgccccgcacccaccgctgacccccggagtcctgtccctcacctccttcaccagtgtccgttctggctactcccacctgccacgccgcaagagaatgtctgtggcccacatgagcttgcaagctgccgctgccctcctcaaggggcgctcggtgctggatgccaccggacagcggtgccgggtggtcaagcgcagctttgccttcccgagcttcctggaggaggatgtggtcgatggggcagacacgtttgactcctccttttttagtaaggaagaaatgagctccatgcctgatgatgtctttgagtcccccccactctctgccagctacttccgagggatcccacactcagcctcccctgtctcccccgatggggtgcaaatccctctgaaggagtatggccgagccccagtccccgggccccggcgcggcaagcgcatcgcctccaaggtgaagcactttgcctttgatcggaagaagcggcactacggcctcggcgtggtgggcaactggctgaaccgcagctaccgccgcagcatcagcagcactgtgcagcggcagctggagagcttcgacagccaccggccctacttcacctactggctgaccttcgtccatgtcatcatcacgctgctggtgatttgcacgtatggcatcgcacccgtgggctttgcccagcacgtcaccacccagctggtgctgcggaacaaaggtgtgtacgagagcgtgaagtacatccagcaggagaacttctgggttggccccagctcgattgacctgatccacctgggggccaagttctcaccctgcatccggaaggacgggcagatcgagcagctggtgctgcgcgagcgagacctggagcgggactcaggctgctgtgtccagaatgaccactccggatgcatccagacccagcggaaggactgctcggagactttggccacttttgtcaagtggcaggatgacactgggccccccatggacaagtctgatctgggccagaagcggacttcgggggctgtctgccaccaggaccccaggacctgcgaggagccagcctccagcggtgcccacatctggcccgatgacatcactaagtggccgatctgcacagagcaggccaggagcaaccacacaggcttcctgcacatggactgcgagatcaagggccgcccctgctgcatcggcaccaagggcagctgtgagatcaccacccgggaatactgtgagttcatgcacggctatttccatgaggaagcaacactctgctcccaggtgcactgcttggacaaggtgtgtgggctgctgcccttcctcaaccctgaggtcccagatcagttctacaggctctggctgtctctcttcctacatgctggcgtggtgcactgcctcgtgtctgtggtctttcaaatgaccatcctgagggacctggagaagctggccggctggcaccgtatcgccatcatcttcatcctcagtggcatcacaggcaacctcgccagtgccatctttctcccataccgggcagaggtgggcccggccggctcacagttcggcctcctcgcctgcctcttcgtggagctcttccagagctggccgctgctggagaggccctggaaggccttcctcaacctctcggccatcgtgctcttcctgttcatctgtggcctcctgccctggatcgacaacatcgcccacatcttcggcttcctcagtggcctgctgctggccttcgccttcctgccctacatcaccttcggcaccagcgacaagtaccgcaagcgggcactcatcctggtgtcactgctggcctttgccggcctcttcgccgccctcgtgctgtggctgtacatctaccccattaactggccctggatcgagcacctcacctgcttccccttcaccagccgcttctgcgagaagtatgagctggaccaggtgctgcactgaccgctgggccacacggctgcccctcagccctgctggaacagggtctgcctgcgagggctgccctctgcagagcgctctctgtgtgccagagagccagagacccaagacagggcccgggctctggacctgggtgcccccctgccaggcgaggctgactccgcgtgagatggttggttaaggcggggtttttctggggcgtgaggcctgtgagatcctgacccaagctcaggcacacccaaggcacctgcctctctgagtcttgggtctcagttcctaatatcccgctccttgctgagaccatctcctggggcagggtccttttcttcccaggtcctcagcgctgcctctgctggtgccttctcccccactactactggagcgtgcccttgctggggacgtggctgtgccctcagttgcccccagggctgggtgcccaccatgccccttcctctttctcctcctacctctgccctgtgagcccatccataaggctctcagatgggacattgtgggaaaggctttggccatggtctgggggcagagaacaaggggggagacacaagtagacctcaggtagaacgacactgggcggagccaccccagggcctgctcccagggagtgctcgaggcgcatcaggcccgttttttaccagtttatatcacggtcttcatttttaaaagtaacgctaactttgtacggacgatgtctcatggattaaataatattctttatggcagtaaaaaaaaaaa

SEQ ID NO: 311 - DNA, 3181 bp, Homo sapiens
gcttttagtttctcttctttctaaagaaggctcgcggagcccggctggagaacctcaccctcgccgagcctagaaccgagagggggccaccccaggcggtcaccagcagatttgcccgcgcgttctctttctttccacccagttgcccttgcggccggctgtaaacctgccactaggacccggtcggtgagatctagcctcttgacctgagagccgagagtggatcgctgggctgggctaacggcgacggagagcgcgccctcgctgactccgggcgcgcccagcagtagcaccgcccgcgcccgcccctggacacttgtaagtttcgatttccgatttccgcggaaccgagtcccgcgccgcggcagagccagcacagccagcgcgccatggcggacccggaggtgtgctgcttcatcaccaaaatcctgtgcgcccacgggggccgcatggccctggacgcgctgctccaggagatcgcgctgtctgagccgcagctctgtgaggtgctgcaggtggccgggcccgaccgctttgtggtgttggagaccggcggcgaggccgggatcacccgatcggtggtggccaccactcgagcccgggtctgccgtcgcaagtactgccagagaccctgcgataacctgcatctctgcaaactcaacttgctgggccggtgcaactattcgcagtccgagcggaatttatgcaaatattctcatgaggttctctcagaagagaacttcaaagtcctgaaaaatcacgaactctctggactgaacaaagaggaattagcagtgctcctcctccaaagtgatcctttttttatgcccgagatatgcaaaagttataagggagagggtcggcagcagatttgtaaccagcagccaccgtgttcaagactccacatctgtgaccacttcacccgagggaactgtcgttttcccaactgcctccggtcccataacctgatggacagaaaggtgctggccatcatgagggagcacgggctgaaccccgacgtggtccagaacatccaggacatctgcaacagcaagcacatgcagaagaatcccccagggcccagagctccttcttcacatcgtagaaacatggcatatagggctagaagcaagagtagagatcggttctttcagggcagccaagaatttcttgcgtctgcttcagcgtctgctgagaggtcctgcacacctagtccagatcagatcagccacagggcttccctggaggacgcgcctgtggacgatctcacccgcaagttcacgtatctggggagtcaggatcgcgctcggcctccctcaggctcgtccaaggctactgatcttggaggaacaagtcaggccgggacaagccagaggtttttagagaacggcagtcaagaggacctcttgcatggaaatccaggcagcacttaccttgcttccaattcaacatcagcccccaactggaagagcctcacatcctggacgaatgaccaaggcgccaggagaaagactgtgttttctcccacgctacctgccgcccgctcttctcttggctctctgcaaacacctgaagctgtgaccaccagaaagggcacaggcttgctttcctcagactacaggatcatcaatggcaaaagtggaactcaggacatccagcctggccctctttttaataataatgctgatggagtggccacagatataacttctaccagatccttaaattacaaaagcactagcagcggtcacagagaaatatcatcacctaggattcaggatgctggacctgcttcccgagatgtccaggccactggcagaatcgcagatgatgctgacccaagagtagcacttgttaacgattctttatctgatgtcacaagtaccacatcttctagggtggatgatcatgactcagaggaaatttgtcttgaccatctgtgtaagggttgtccgcttaatggtagctgcagcaaagtccacttccatctgccttaccggtggcagatgcttattggtaaaacctggacggactttgagcacatggagacgatcgagaaaggctactgtaaccccggaatccacctctgttctgtaggaagttatacaatcaattttcgggtaatgagttgtgattcctttcccatccgacgcctctccactccttcttctgtcaccaagccagccaattctgtcttcaccaccaaatggatttggtattggaagaatgaatctggcacatggattcagtatggagaagagaaagacaaacggaaaaattcaaacgtcgactcttcatacctggagtctctctatcaatcctgtccgaggggagttgtgccatttcaggcgggctcacggaactatgagctgagtttccaagggatgattcagacaaacatagcttccaaaactcaaaaggatgtcatcagaagaccaacatttgtgcctcagtggtatgtgcagcagatgaagagagggccagagtaagtgttctgaagcagctgtttgctgacagatgcttgagatgttcatgccctgggctcatcaagtcactcgtgaatctggagcctgttttcctgaaaagttcctgtttgcattactctgcagtttccatttgcattatcgatgagtaagatgcttgttaagcagcatggtgtgactgaaaggatactagatcggaaaatgaattttctttctgaaagggaagtctgagcgagtctcctaaatactctgggctttagcttctccagctgtgaagagctggattgatgcagtacacctaaggaataatcatatatactgggtttttgttttgctgtggattcttttttttttttttttttttagagggggtctcactttgttgcccaggctggtcttgaactcctgagctcaagtgatcctcctacctcagtctcccaaagtgctgggattacaggcatgagccaccgtgcctggctttgctgtggattcttttgggtgtcttttgttttcctacacgatttatagaggatgaggggcggagaaagagatagaaaaaagggatgagctagctgttagagcaagggttttggtgagagataatattgattgaagggattttaaaggaaatgttgctgtgggggattcattgtaactctccttgtgaactgctcagtaaactctacattgttcatgaa

SEQ ID NO: 312 - DNA, 4777 bp, Homo sapiens
gtttccggccgccgtcgctgtccagggaggctgaggcgagaggtagctgtccgggtggggagcccgcactaccttcttcctcttcctcctcctcctccgggtgaggggagcgaaggttgggggtccccgagcccatggaccaggaggaggcggaggccgccgagagccggggccccgctatgtggccctgagccccgtgtactggttctgcctgtctggagggccatggagaagaggctgggagtcaagccaaatcctgcttcctggattttatcaggatattattggcagacatctgcgaagtggttgagaagcctgtacctgttttatacttgcttttgcttcagcgttctgtggttgtcaacagatgccagtgagagcaggtgccagcaggggaagacacaatttggagttggcctgagatctgggggagaaaatcacctctggcttcttgaaggaaccccctctctccagtcatgttgggctgcctgctgccaggactctgcctgccatgtcttttggtggctagaagggatgtgcattcaggcagactgcagcaggccccagagctgccgggcttttaggacacactcctccaattccatgctggtgtttttaaaaaaattccaaactgcagatgatttgggctttctacctgaagatgatgtaccacatcttctggggctaggttggaactgggcatcttggaggcagagcccacccagagctgcactcagacctgctgtatcttccagtgaccagcagagcttaatcaggaagcttcagaagagaggtagtcccagtgacgtagttacacctatagtgacacagcattctaaagtgaatgactccaacgaattaggtggtctgactaccagtggctctgcagaggtccacaaggcgattacaatttccagtcccctaaccacagacctgactgcagagctgtctggtgggccaaagaatgtatcagtgcaacctgaaatatcagagggtcttgctactacgcccagcactcaacaagtaaaaagttctgagaaaacccagattgctgtcccccagccagtggctccctcctacagttatgctacccctaccccccaggcctctttccagagcacctcagcaccatacccagttataaaggaactggtggtatctgctggagagagtgtccagataaccctgcctaagaatgaagttcaattaaatgcatatgttctccaagaaccacctaaaggagaaacctacacctacgactggcagctgattactcatcctagagactacagtggagaaatggaagggaaacattcccagatcctcaaactatcgaagctcactccaggcctgtatgaattcaaagtgattgtagagggtcaaaatgcccatggggaaggctatgtgaacgtgacagtcaagccagagccccgtaagaatcggccccccattgctattgtgtcacctcagttccaggagatctctttgccaaccacttctacagtcattgatggcagtcaaagcactgatgatgataaaatcgttcagtaccattgggaagaacttaaggggcctctaagagaagagaagatttctgaagatacagccatattaaaactaagtaaactcgtccctgggaactacactttcagcttgactgtagtagactctgatggagctaccaactctactactgcaaacctgacagtgaacaaagctgtggattacccccctgtggccaacgcaggccccaaccaagtgatcaccctgccccaaaactccatcaccctctttgggaaccagagcactgatgatcatggcatcaccagctatgagtggtcactcagcccaagcagcaaagggaaagtggtggagatgcagggtgttagaacaccaaccttacagctctctgcgatgcaagaaggagactacacttaccagctcacagtgactgacacaataggacagcaggccactgctcaagtgactgttattgtgcaacctgaaaacaataagcctcctcaggcagatgcaggcccagataaagagctgacccttcctgtggatagcacaaccctggatggcagcaagagctcagatgatcagaaaattatctcatatctctgggaaaaaacacagggacctgatggggtgcagctcgagaatgctaacagcagtgttgctactgtgactgggctgcaagtggggacctatgtgttcaccttgactgtcaaagatgagaggaacctgcaaagccagagctctgtgaatgtcattgtcaaagaagaaataaacaaaccacctatagccaagataactgggaatgtggtgattaccctacccacgagcacagcagagctggatggctctaagtcctcagatgacaagggaatagtcagctacctctggactcgagatgaggggagcccagcagcaggggaggtgttaaatcactctgaccatcaccctatcctttttctttcaaacctggttgagggaacctacacttttcacctgaaagtgaccgatgcaaagggtgagagtgacacagaccggaccactgtggaggtgaaacctgatcccaggaaaaacaacctggtggagatcatcttggatatcaacgtcagtcagctaactgagaggctgaaggggatgttcatccgccagattggggtcctcctgggggtgctggattccgacatcattgtgcaaaagattcagccgtacacggagcagagcaccaaaatggtattttttgttcaaaacgagcctccccaccagatcttcaaaggccatgaggtggcagcgatgctcaagagtgagctgcggaagcaaaaggcagactttttgatattcagagccttggaagtcaacactgtcacatgtcagctgaactgttccgaccatggccactgtgactcgttcaccaaacgctgtatctgtgaccctttttggatggagaatttcatcaaggtgcagctgagggatggagacagcaactgtgagtggagcgtgttatatgttatcattgctacctttgtcattgttgttgccttgggaatcctgtcttggactgtgatctgttgttgtaagaggcaaaaaggaaaacccaagaggaaaagcaagtacaagatcctggatgccacggatcaggaaagcctggagctgaagccaacctcccgagcaggcatcaaacagaaaggccttttgctaagtagcagcctgatgcactccgagtcagagctggacagcgatgatgccatctttacatggccagaccgagagaagggcaaactcctgcatggtcagaatggctctgtacccaacgggcagacccctctgaaggccaggagcccgcgggaggagatcctgtagccacctggtctgtctcctcagggcagggcccagcacactgcccggccagtcctcctacctcccgagtctgcgggcagctgctgtcccagcatctgctggtcatttcgccctgacagtcccaaccagaacccctgggacttgaatccagagacgtcctccaggaacccctcaacgaagctgtgaatgaagaggtttcctctttaaacctgtctggtgggcccccagatatcctcacctcagggcctcctttttttgcaaactcctcccctcccccgagggcagacccagccagctgctaagctctgcagctccccagtggacagtgtcattgtgcccagagtgctgcaaggtgaggcctgctgtgctgcccgcacacctgagtgcaaaaccaagcactgtgggcatggtgtttccctctctggggtagagtacgccctctcgctgggcaaagaggaagtggcacccctcccctcaccacagatgctgagatggtagcatagaaatgatggccgggcgcggtggctcacgcctgtaatcccagcactttgggaggccgaggcgggcggatcatgaggtcaggagatcaagaccaccctggctaacacggtgaaaccccatctctactaaaaataaaaaaaaaaattagccgggtttggtggcgtatgcctgtaatcccagctactcgggaggctgaggcaggagaattgcttaaacctgggaggtggaggctgcagtgagccaagatcgtgccactgcactccagcctgagtgacagagcaagactccgtcaaaaaaaaaaaaaaaaaaaaagaaatgatatctggcccccccttaacactggagccccactcccttctcccatccggcccgagattagggaggattgactgtgtcagggatggcgggtggcctctctcgctgccagggcccttgtcagagcagccaggctggacagacggcctccctcctctccatctgaccggcacctgctgcttcggggcttaggccaccgctccctgtccccagaggagatagccccagatggactggaatgttgtggcatgagagcgcatgtgtgcgatggccccgctgtggtcccctctctgtccctccatctgtatgtgttctgtgtcccttgcatgtgtgcgtgttagagtgagcgcgtatgcatcaactcattgggctcttggctgctcacaaggcaaatttgacttggaaagactttcatctccttggaaccaagacttcctgagtccccctcaccctggccctgttccaccatggttatctgggtattggggaatggaaactttgggggagtgactttttaaagagacacttataatttctactactgcactactgtccattgtgggatgattaaacatggtatttaactgtg

SEQ ID NO: 313 - DNA, 3391 bp, Homo sapiens
gcgcgctctggtactgctgtggctccccgtcctggtgcgggacctgtgccccgcgcttcagccctccccgcacagcctactgattcccctgccgcccttgctcacctcctgctcgccatggagtcgctggttttcgcgcggcgctccggccccactccctcggccgcagagctagcccggccgctggcggaagggctgatcaagtcgcccaagcccctaatgaagaagcaggcggtgaagcggcaccaccacaagcacaacctgcggcaccgctacgagttcctggagaccctgggcaaaggcacctacgggaaggtgaagaaggcgcgggagagctcggggcgcctggtggccatcaagtcaatccggaaggacaaaatcaaagatgagcaagatctgatgcacatacggagggagattgagatcatgtcatcactcaaccaccctcacatcattgccatccatgaagtgtttgagaacagcagcaagatcgtgatcgtcatggagtatgccagccggggcgacctttatgactacatcagcgagcggcagcagctcagtgagcgcgaagctaggcatttcttccggcagatcgtctctgccgtgcactattgccatcagaacagagttgtccaccgagatctcaagctggagaacatcctcttggatgccaatgggaatatcaagattgctgacttcggtctctccaacctctaccatcaaggcaagttcctgcagacattctgtgggagccccctctatgcctcgccagagattgtcaatgggaagccctacacaggcccagaggtggacagctggtccctgggtgttctcctctacatcctggtgcatggcaccatgccctttgatgggcatgaccataagatcctagtgaaacagatcagcaacggggcctaccgggagccacctaaaccctctgatgcctgtggcctgatccggtggctgttgatggtgaaccccacccgccgggccaccctggaggatgtggccagtcactggtgggtcaactggggctacgccacccgagtgggagagcaggaggctccgcatgagggtgggcaccctggcagtgactctgcccgcgcctccatggctgactggctccggcgttcctcccgccccctcctggagaatggggccaaggtgtgcagcttcttcaagcagcatgcacctggtgggggaagcaccacccctggcctggagcgccagcattcgctcaagaagtcccgcaaggagaatgacatggcccagtctctccacagtgacacggctgatgacactgcccatcgccctggcaagagcaacctcaagctgccaaagggcattctcaagaagaaggtgtcagcctctgcagaaggggtacaggaggaccctccggagctcagcccaatccctgcgagcccagggcaggctgcccccctgctccccaagaagggcattctcaagaagccccgacagcgcgagtctggctactactcctctcccgagcccagtgaatctggggagctcttggacgcaggcgacgtgtttgtgagtggggatcccaaggagcagaagcctccgcaagcttcagggctgctcctccatcgcaaaggcatcctcaaactcaatggcaagttctcccagacagccttggagctcgcggcccccaccaccttcggctccctggatgaactcgccccacctcgccccctggcccgggccagccgaccctcaggggctgtgagcgaggacagcatcctgtcctctgagtcctttgaccagctggacttgcctgaacggctcccagagcccccactgcggggctgtgtgtctgtggacaacctcacggggcttgaggagcccccctcagagggccctggaagctgcctgaggcgctggcggcaggatcctttgggggacagctgcttttccctgacagactgccaggaggtgacagcgacctaccgacaggcactgagggtctgctcaaagctcacctgagtggagtaggcattgccccagcccggtcaggctctcagatgcagctggttgcaccccgaggggagatgccttctcccccacctcccaggacctgcatcccagctcagaaggctgagagggtttgcagtggagccctgagcagggctggatatgggaagtaggcaaatgaaatgcgccaagggttcagtgtctgtcttcagccctgctgaacgaagaggatactaaagagaggggaacgggaatgcccgcgacagagtccacattgcctgtttcttgtgtacatgggggggccacagagacctggaaagagaactctcccagggcccatctcctgcatcccatgaatactctgtacacatggtgccttctaaggacagctccttccctactcattccctgcccaagtggggccagacctctttacacacacattcccgttcctaccaaccaccagaactggatggtggcacccctaatgtgcatgaggcatcctgggaatggtctggagtaacgcttcgttatttttatttttatttttatttatttatttatttttttgagacggagtttcgctcttggtgcccaggctagagtgcaatggcgcgatctcagctcacctcaacctccgcctcccgggttcaagcgattctcctgcctcagcctccctagtagctgggattacaggcgcccgccaccatgcccggctaattttgtatttttagtagagacagggtttctccatgttggtcaggctggtctcaaactcccgacctcaggtgatccacccacctcggcctcccaaagtgctgggattacaggcgtgagccaccgcgccccacctaacccttccttatttagcctaggagtaagagaacacaatctctgtttcttcaatggttctcttcccttttccatcctccaaacctggcctgagcctcctgaagttgctgctgtgaatctgaaagacttgaaaagcctccgcctgctgtgtggacttcatctcaaggggcccagcctcctctggactccaccttggacctcagtgactcagaacttctgcctctaagctgctctaaagtccagactatggatgtgttctctaggccttcaggactctagaatgtccatatttatttttatgttcttggctttgtgttttaggaaaagtgaatcttgctgttttcaataatgtgaatgctatgttctgggaaaatccactatgacatctaagttttgtgtacagagagatatttttgcaactatttccacctcctcccacaaccccccacactccactccacactcttgagtctctttacctaatggtctctacctaatggacctccgtggccaaaaagtaccattaaaaccagaaaggtgattggaa

SEQ ID NO: 314 - DNA, 751 bp, Homo sapiens
gtcgtctcccggcagtgcagctgccgctaccgccgccctctgcccgccggcccgtctgtctacccccagcatgagcggcctgcgcgtctacagcacgtcggtcaccggctcccgcgaaatcaagtcccagcagagcgaggtgacccgaatcctggatgggaagcgcatccaataccagctagtggacatctcccaggacaacgccctgagggatgagatgcgagccttggcaggcaaccccaaggccaccccaccccagattgtcaacggggaccagtactgtggggactatgagctcttcgtggaggctgtggaacaaaacacgctgcaggagttcctgaagctggcttgagtcaagcctgtccagagttcccctgctggactccatcaccacactccccccagccttcacctggccatgaaggaccttttgaccaactccctgtcattcctaacctaaccttagagtccctcccccaatgcaggccacttctcctccctcctctctaaatgtagtcccctctcctccatctaaaggcaacattccttacccattagtctcagaaattgtcttaagcaacagccccaaatgctggctgcccccagccaagcattggggccgccatcctgcctggcactggctgatgggcacctctgttggttccatcagccagagctctgccaaaggccccgcagtccctctcccaggaggaccctagaggcaattaaatgatgtcctgttccattggca

SEQ ID NO: 315 - DNA, 4248 bp, Homo sapiens
gctcttgcggtggcgtaatctctcagcctttctgtgtctcctttcctccgcctcagtttggggcgggtcgggggaatggctgaggagatggagtcgtcgctcgaggcaagcttttcgtccagcggggcagtgtcaggggcctcagggtttttgcctcctgcccgctcccgcatcttcaagataatcgtgatcggcgactccaatgtgggcaagacatgcctgacctaccgcttctgcgctggccgcttccccgaccgcaccgaggccacgataggggtggatttccgagaacgagcggtggagattgatggggagcgcatcaagatccagctatgggacacagcaggacaagaacgattcagaaagagcatggttcagcactactacagaaatgtacatgctgttgtcttcgtgtatgatatgaccaacatggctagttttcatagcctaccatcttggatagaagaatgcaaacaacatttgctagccaatgatataccacggattcttgttggaaataaatgtgacttgagaagtgccatacaggtacccacagacttggcacaaaaatttgctgacacacacagtatgcctttgtttgaaacgtctgctaaaaaccccaatgataatgaccatgtggaagctatatttatgaccttggctcataagcttaagagccacaaaccattaatgcttagtcagccccctgataatggaattatcctgaagcctgaaccaaagcctgcaatgacgtgctggtgctaaataacagtctttattatattatctaattttgactaaagaaatacttttgaagtatgacagtattaagtcataagatttaatctcaactataatgggtcatcttgacactttgctgtttgtcattgtcacgcttttgtattttgtatctacttaagtttgtcactgtgacaacacaggaaaagttggttttcaggtgagattgaaaatgaagcaaagataggatgaatctgaacatctctccatctagagcccaatgaaggaagcttcaaatgagaacatgatggaatcagtaaccattcaatcttttgtcctaggattggaaaaaaatgttaaaggtttaggacacacctaatagtatgtcctttgaatgggaagtgttcttaataggataaaaactggtatttgcctctccccagagtactttttttgttttttcatagagacggggtcttgctatgttgtccaggctggccttgagctcctgggctcaagcaatcctcccacctcagcctccccagtactgggactgtaggtactcaccactgcatctggcctttctttgttttattaacatatttagttttgttattattggtatgttttagagccaagactttagttccagtgggataagaaggcatagaatgttttctggttcccagtccataaagaatgacttttccaagagttctagatgtttgattttctaattaatacttatcagatctacaaaaatcattattattttaaaagagttatttgagtttctttctttctttttttttttttttttttttgagatggagtctcgctctgtctccaggctggagtgcagtggcgtcatctcggctcactgcaacctccgcctcccaggttcaagtgattctcctgcctcagcctcccgagtagctgggattacaggcgtgcactaccacacccagctgatttttgtatttttagtatagatggggtttcaccatgttggccaggatggtctcgatctcttgacctcatgatccacccgcctcagcttcccaaagtgctgggattacaggtgtgagtcactgcacccagccgagttgctttcttactaaatcctattaaaatatgcaaaaataagtcagattttaaggcaaataaagtgacataaggtgctttatattttattttggtatatttaaacagtgaaaaactaactgaaagcacatgaagagttgtaacttgggggaaaataggtaaacatagcttctagctaacacaggagacctattcttagcctttactaatttcaagcagtgtatcccatatggtatctcttgctcttccttcaactccaataaatttaatgactaaatgccaagttaacaaatcaacttccatttggattgtaggtgtgaaggcacaactctaattgctattagtctacatgtatttctgtaatagtattgtgtcatatcaatttttaagatgtctaaattttatggtcacaagttatccctcctcagtatgaaaaataaattagatattgaaaaatgtctaaacttcagtgatggaaagaatatttcaagaagttttttaacctaaatacttttattttgaatttaagtctttgcacataaaatatagcaagcttacatattaaactatttacgtaaatggaatgtaagccatgactttaactgaagtgttcacattcactaattttgatagattgctgtccttaataattttggaggaaattaagccaaatgattattgtactacagtattttcagaatatgggaaatcaattaaaaatgtaatctaatctagtttaagatttttgtttaatcatcatggtggtcctacctggataatttaactataaagacaaagtaattctattaaatgaactaactgaaaataataattataggaagtgattattccattttaagtattagagctcaaattggctttatttgcatttagggagatcatgttttcttaatcatgctggaatttaaaaattgttttacttgtatcgaaattaaccttgatttataactatttttgtaataaaacaatgacagctgtagtaactatgatgggtgtaacaacatttttttaaagaagggaatctgtttatcgcttttcaaaatattttctaaagtgggggaagaaagtttatagactttccaagcacatttatggttttttattactattattatggttttaaaaagagtaactttatttctttttgtaaggaattaagtaatatcctttacagttctgtgaaaggacttattttttaactgtaatatttattagttttaaaatatttgtatctcatttgtaacaatttgttttaattttttatatatatgtttttatttttaaaaaacataccagttgaatggggttaaagctttcaatatcttaaaatatttataaaacatttcactgttgcaaaatcacttccaaaatgatagctatctaacaactaattactaatttttaaagaacaaatcacacatttaaaaaatctgtagaatttattttaactatgacctttaattgaaaataaataattaaaatatcagacatgttttggaaaagtcttaatttgagaacaccaaaggaaactaccccagaatctaatgtagttcgctattaataacaatgcattattgaaagtatattgcaaatacatgtttcctcatgaaatctaagtaattttgttgtggaatagtgtcactgttacatttcccccatgaagttcaataaaccagcttagccacaaagaaattgtgttttattttctttgtttggttactgggtagagtataaaataaaacaatctttttttcctcctggtttccagataatattatatatatgatacacttttgaaaacaacaaaaagcccccaacccattggacaattattttcttgtatacatttgaggtcaaagaacacttcaggaaaaaaactcaacaaagtattaaaattagctgataacacagcttttgtatttgtgtgttttagtaatccagcttgttttagaatagttcagtgcaaaaagcaaatggtgcaagaggagttgatgtgtatttagacgtaaaagcatttaacagaatgaataactatagaaagtatgagaaaagagaacgaactacgtctcaggtataagattgcagttactgatttagacaccataggattagggatgtgggggcctctgatgttgattctgcttcccctggtcagtttattttacgtataagttacccttgtgttcaaacacaaaattgacattattcatgaaggactgctttcttaatcagatattaagaagttcgtcatgtattttgggagcacgtttgctacagcctgtgtggcaagggcgaatgcacttggtttgttggaataacctgatttatcaaacatttatcaagtatgggtcatgtgttctctatttgtgttagtggagctacata

SEQ ID NO: 316 - DNA, 3923 bp, Homo sapiens
gtactggcccgcgccgtccgcccgccgacagctccctgagccagcccgggaggcagccgcgcgcagcgagccggtggcgcaggtgtcggggtcctcgagcgcccagcctgggagcatgattgtggacaagctgctggacgacagccgcggcggagaggggctgcgggacgcggcgggcggctgcggcctcatgaccagcccgctcaacctgagctacttctacggcgcgtcgccgcccgccgccgccccgggcgcctgcgacgccagctgctcggtcttgggcccctcggcgcccggctcgcccggctccgactcctccgacttctcctctgcctcgtcggtgtcctcctgcggcgccgtggagtcccggtcgagaggcggcgcccgcgccgagcgccagccagttgagccccatatgggggttggcaggcagcagagaggcccctttcaaggtgttcgggtaaagaactcagtgaaggaactcctgttgcacatccgaagtcataaacagaaggcttctggccaagctgtggatgattttaagacacaaggtgtgaacatagaacagttcagagaattgaagaacacagtatcatacagtgggaaaaggaaagggcccgattcgttgtctgatggacctgcttgcaaaaggccagctctgttgcattcccaatttttgacaccacctcaaacaccaacgcccggggagagcatggaagatgttcatctcaatgaacccaaacaggagagcagtgctgatctgcttcagaacattatcaacattaagaatgaatgcagccccgtttccctgaacacagttcaagttagctggctgaaccccgtggtggtccctcagagctcccccgcagagcagtgtcaggacttccatggagggcaggtcttttctccacctcagaaatgccaaccattccaagtcaggggctcccaacaaatgatagaccaggcttccctgtaccagtattctccacagaaccagcatgtagagcagcagccacactacacccacaaaccaactctggaatacagtccttttcccatacctccccagtcccccgcttatgaaccaaacctctttgatggtccagaatcacagttttgcccaaaccaaagcttagtttcccttcttggtgatcaaagggaatctgagaatattgctaatcccatgcagacttcctccagtgttcagcagcaaaatgatgctcacttgcacagcttcagcatgatgcccagcagcgcctgtgaggccatggtggggcacgagatggcctctgactcttcaaacacttcactgccattctcaaacatgggaaatccaatgaacaccacacagttagggaaatcactttttcagtggcaggtggagcaggaagaaagcaaattggcaaatatttcccaagaccagtttctttcaaaggatgcagatggtgacacgttccttcatattgctgttgcccaagggagaagggcactttcctatgttcttgcaagaaagatgaatgcacttcacatgctggatattaaagagcacaatggacagagtgcctttcaggtggcagtggctgccaatcagcatctcattgtgcaggatctggtgaacatcggggcacaggtgaacaccacagactgctggggaagaacacctctgcatgtgtgtgctgagaagggccactcccaggtgcttcaggcgattcagaagggagcagtgggaagtaatcagtttgtggatcttgaggcaactaactatgatggcctgactccccttcactgtgcagtcatagcccacaatgctgtggtccatgaactccagagaaatcaacagcctcattcacctgaagttcaggagcttttactgaagaataagagtctggttgataccattaagtgcctaattcaaatgggagcagcggtggaagcgaaggatcgcaaaagtggccgcacagccctgcatttggcagctgaagaagcaaatctggaactcattcgcctctttttggagctgcccagttgcctgtcttttgtgaatgcaaaggcttacaatggcaacactgccctccatgttgctgccagcttgcagtatcggttgacacaattagatgctgtccgcctgttgatgaggaagggagcagacccaagtactcggaacttggagaacgaacagccagtgcatttggttcccgatggccctgtgggagaacagatccgacgtatcctgaagggaaagtccattcagcagagagctccaccgtattagctccattagcttggagcctggctagcaacactcactgtcagttaggcagtcctgatgtatctgtacatagaccatttgccttatattggcaaatgtaagttgtttctatgaaacaaacatatttagttcactattatatagtgggttatattaaaagaaaagaagaaaaatatctaatttctcttggcagatttgcatatttcatacccaggtatctgggatctagacatctgaatttgatctcaatggtaacattgccttcaattaacagtagcttttgagtaggaaaggactttgatttgtggcacaaaacattattaatatagctattgacagtttcaaagcaggtaaattgtaaatgtttctttaagaaaaagcatgtgaaaggaaaaaggtaaatacagcattgaggcttcatttggccttagtccctgggagttactggcgttggacaggcttcagtcattggactagatgaaaggtgtccatggttagaatttgatctttgcaaactgtatataattgttatttttgtccttaaaaatattgtacatacttggttgttaacatggtcatatttgaaatgtataagtccataaaatagaaaagaacaagtgaattgttgctatttaaaaaaattttacaattcttactaaggagtttttattgtgtaatcactaagtctttgtagataaagcagatggggagttacggagttgttcctttactggctgaaagatatattcgaattgtaaagatgctttttctcatgcattgaaattatacattatttgtagggaattgcatgcttttttttttttttctcccgagacagggtcttgctctggcgcccaggctggagtacagtggcatgatcttggctcacttcagccttgacttgggctcaagtgatcctcctacctgagccttctgagtaactggaactacaggtgtgcactcctcgcctggctaattttttattttttgtacaggcaggatcttgccaccttgcccaggctggtcttgaactcctgagctcatgccatctgcctgccttagtctcccaaaatgctgggattacaggagtgagccaccatgcccggctggcagttgcatggaagagaacacctctttatggcttaccctctagaatttctaatttatgtgttctgttgaaatttttgtttttttacctttattgaaacaacaaaaagtcagtattgaaacatatcttcctgttttctgttgtcaaatgatgataatgtgccatgatgttttatatatatcattcagaaaaagttttattttttaataacattctattaacattattttgcttgccgctggcatgcctgaggaatgtatttggctttgattacacactaagtttttgtaataaatttgactcattaaaaaccttttttttttaaaaaaaaaaaaaaagaaaatctcattagtgaacttatctttgcagctgagtacttaaattctttttaaaaagataccctttggattgatcacattgtttgacccagtatgtcttgtagacacgttagttataatcaccttgtatctctaaatatggtgtgatatgaaccagtccattcacattggaaaaactgatggttttaaataaactaattcactaata

SEQ ID NO: 317 - DNA, 3440 bp, Homo sapiens
gttcactgtctcagtgagtctcttggcagtagggccccgtccctgtccgccaccgcacagtgacatactttctcccgccctctcccctaggtcagctggaactgggtccgcctggaaacccgggggccgggcccccagagggctttcgcagcctggccgcccgaagctcacctgccctttcactgaactccacccggaaggtgcccggggcttcgtgttcctgggtgctgaccgtgcactccccgccgcccgaggacttagagctctggaagtagctctccagcttccttcgtactcgggggccggacttgtacacccgcacgaggagcggggacggcgggcgcagaagtgggccaccatatctggaaactacagtctatgctttgaagcgcaaaagggaataaacatttaaagactcccccggggacctggaggatggacttttccatggtggccggagcagcagcttacaatgaaaaatcaggtaggattacctcgctctcactcttgtttcagaaagtctttgctcagatctttcctcagtggagaaaggggaatacagaagaatgtctcccctacaagtgctcagagactggtgctcttggagaaaactatagttggcaaattcccattaaccacaatgacttcaaaattttaaaaaataatgagcgtcagctgtgtgaagtcctccagaataagtttggctgtatctctaccctggtctctccagttcaggaaggcaacagcaaatctctgcaagtgttcagaaaaatgctgactcctaggatagagttatcagtctggaaagatgacctcaccacacatgctgttgatgctgtggtgaatgcagccaatgaagatcttctgcatgggggaggcctggccctggccctggtaaaagctggtggatttgaaatccaagaagagagcaaacagtttgttgccagatatggtaaagtgtcagctggtgagatagctgtcacgggagcagggaggcttccctgcaaacagatcatccatgctgttgggcctcggtggatggaatgggataaacagggatgtactggaaagctgcagagggccattgtaagtattctgaattatgtcatctataaaaatactcacattaagacagtagcaattccagccttgagctctgggatttttcagttccctctgaatttgtgtacaaagactattgtagagactatccgggttagtttgcaagggaagccaatgatgagtaatttgaaagaaattcacctggtgagcaatgaggaccctactgttgctgcctttaaagctgcttcagaattcatcctagggaagagtgagctgggacaagaaaccaccccttctttcaatgcaatggtcgtgaacaacctgaccctccagattgtccagggccacattgaatggcagacggcagatgtaattgttaattctgtaaacccacatgatattacagttggacctgtggcaaagtcaattctacaacaagcaggagttgaaatgaaatcggaatttcttgccacaaaggctaaacagtttcaacggtcccagttggtactggtcacaaaaggatttaacttgttctgtaaatatatataccatgtactgtggcattcagaatttcctaaacctcagatattaaaacatgcaatgaaggagtgtttggaaaaatgcattgagcaaaatataacttccatttcctttcctgcccttgggactggaaacatggaaataaagaaggaaacagcagcagagattttgtttgatgaagttttaacatttgccaaagaccatgtaaaacaccagttaactgtaaaatttgtgatctttccaacagatttggagatatataaggctttcagttctgaaatggcaaagaggtccaagatgctgagtttgaacaattacagtgtcccccagtcaaccagagaggagaaaagagaaaatgggcttgaagctagatctcctgccatcaatctgatgggattcaacgtggaagagatgtatgaggcccacgcatggatccaaagaatcctgagtctccagaaccaccacatcattgagaataatcatattctgtaccttgggagaaaggaacatgacattttgtctcagcttcagaaaacttcaagtgtctccatcacagaaattatcagcccaggaaggacagagttagagattgaaggagcccgggctgacctcattgaggtggttatgaacattgaagatatgctttgtaaagtacaggaggaaatggcaaggaaaaaggagcgaggcctttggcgctcgttaggacagtggactattcagcaacaaaaaacccaagacgaaatgaaagaaaatatcatatttctgaaatgtcctgtgcctccaactcaagagcttctagatcaaaagaaacagtttgaaaaatgtggtttgcaggttctaaaggtggagaagatagacaatgaggtccttatggctgcctttcaaagaaagaagaaaatgatggaagaaaaactgcacaggcaacctgtgagccataggctgtttcagcaagtcccataccagttctgcaatgtggtatgcagagttggctttcaaagaatgtactcgacaccttgcgatccaaaatacggagctggcatatacttcaccaagaacctcaaaaacctggcagagaaggccaagaaaatctctgctgcagataagctgatctatgtgtttgaggctgaagtactcacaggcttcttctgccagggacatccgttaaatattgttcccccaccactgagtcctggagctatagatggtcatgacagtgtggttgacaatgtctccagccctgaaacctttgttatttttagtggcatgcaggctatacctcagtatttgtggacatgcacccaggaatatgtacagtcacaagattactcatcaggaccaatgagaccctttgcacagcatccttggaggggattcgcaagtggcagccctgttgattaatctctacatcattttaacagctggtatggccttaccttgggtgaactaaccaaataatgaccatcgatggctcaaagagtggcttgaatatatcccatgggttatctgtatggactgactgggttattgaaaggactagccacatactagcatcttagtgcctttatctgtctttatgtcttggggttggggtaggtagataccaaatgaaacactttcaggaccttccttcctcttgcagttgttctttaatctcctttactagaggagataaatattttgcatataatgaagaaatttttctagtatataacgcaggccttttattttctaaaatgatgatagtataaaaatgttaggataacagaatgattttagattttccagagaatattataaagtgctttaggtatgaaaataaatcatctttgtctgattaa

SEQ ID NO: 318 - DNA, 2345 bp, Homo sapiens
tgctgcatggggtcaagcactctggtcggtcccatggagctctgcactgtagcttcccttccacaggccccgcagggcgccccctgcctctgaggatgagtcactgcagcagccgcgccctgaccctgctgagcagcgtgtttggtgcgtgtggcctgctcctggtaggcatcgcggtcagcactgactactggctgtacatggaagaaggcacagtgctaccgcagaaccagaccaccgaggtcaagatggccctgcacgccggcctctggcgagtctgcttctttgcaggtcgggagaaaggtcgctgtgtggcctcagaatattttcttgaaccggagatcaatttggtgacggaaaacacggagaatattctgaagacagtgcgcacggccacccccttccccatggtcagcctcttcctcgtgttcacggccttcgtcatcagcaacatcggccacatccgcccgcagaggaccattctggcttttgtctctggcatcttcttcatactatcgggcctctccttggtggtgggcttggttctttacatctccagcatcaacgacgaggtcatgaacaggcccagcagctctgagcagtattttcattatcgctacgggtggtcttttgccttcgccgcttcctccttcctactcaaagagggggccggcgtgatgtccgtgtacctgttcaccaagcgctacgcggaggaggagatgtaccgtccacacccggccttctaccgcccgcgtctcagcgactgctccgactactcgggccagttcctgcagcccgaggcgtggcgccgcggccggagcccctccgacatctccagcgacgtgtccatccaaatgacgcagaactaccctcccgccatcaagtacccggaccacctgcacatctccacctcgccctgctgaggcccgcccctcggagctccccctgcctcctcctcctcctcgtcttaggggggtctccctgcaatgcagcgcccccttccgtcctcgggactcctcgctcccacccggaggaggctgcgccagctttaggccccgccctcctcccaatggctccgcccacagactcccttatttcaatggccgcgccctcttttcccgacctctccttttcattggtccctctcactcccaaatgactcctccccttcgttggcccgcccctttcctctggcccctcctctccaagaaaattagctcctccctcgttctccacctgctctgagctgggagcagccagaggcggtgcaagcgcccagctccccagagctccccaacctcggacctcaccgcaggggcgctgggctggagagcaggttcgggcagccgtcgggaataccgaccatcctcttctcccttctaacctgggcttcctttttccctgcctaatctcacctcctgacctgctgggtcctccggtgcagtgggagggccggcttgctccacccgcagccccggggtggcgtagggaagggggctggaagccacgggtacggttaacctggcccttccctccccatctcccctacttccctggaaggtcccattctttctcaccggctgggctcttttctgcttcctgaaggttacctgccttttagggggctcttgtctaaaggatcttcttgctttctcagctatccttggcttctttttcgtcttcctcctcctttaactctttctctcctttcctcccttcacccgttcgtcccaagcccttgggtgcatcccgccctaggcgcacaccagacggccagaatggggaccctagggtggagggaattcccccacgccatctccgcacctgtgcccgcctctcccccctcgaggccccgtcgagggagggaggggcagtagcgggggtcgacaccccccccaaacctctaagtcttccattttctggctctcctcctcattgacgtccctcttcccccctcagaaccccaactctggcctctttcaagggcccgtccgccccgttggacagattttggggggagaggaggtcaccaggaactcgcccacccccccttattagggaaagaggggcgaggtagcacagtgctgtacacggaaccagaatggcccccggggtggggggaggggggcaggggagggacgggggcttttagtttgcatcttaggtgggaggggggaggggggacccgccgcagttaacctgactttacgcagcgatttttaacgaggctggggggaggggggcactggggtggggacagggtggggtggggggcctggctctgttatttaccgtgtatcatatgtaaatatcgacagaaacttcaataaactttatttcaaaca

SEQ ID NO: 319 - DNA, 790 bp, Homo sapiens
acttgctctgagacaggtgcggcaagtctactgcgggctggtccgggctcctcaggttcagacccgaccgttatccagtcggttcgtggagaggagaggtgcactttacaggtccccgatgaaccaagagaaccctccaccatatccaggccctggtccaacggccccatacccaccttatccaccacaaccaatgggtccaggacctatggggggaccctacccacctcctcaagggtacccctaccaaggatacccacagtacggctggcagggtggacctcaggagcctcctaaaaccacagtgtatgtggtagaagaccaaagaagagatgagctaggaccatccacctgcctcacagcctgctggacggctctctgttgctgctgtctctgggacatgctcacctgaccagaccagcccagccgtcctgtcctgccagctctgctgccacctctgacaggtgtgcctgcccccatctcttctgattgctgttaacaaatgactagctttgcacagacacctctaccttcagcactatgggattctagattaatgggggttgctactgtttaattcagtgacttgatctttttaatgtccaaaatccatttcttattgatctttaaagatgtgctaaatgacttttttggccaaaggcttagttgtgaaaaatataatttttaaattatacattcaaggtagtggccaaatgtaacacatcaatcatggaatgatttctctgctaacagccgcctgtatgtttcaataaatttgtccaaagctcaa

SEQ ID NO: 320 - DNA, 7121 bp, Homo sapiens
actctctctctttctctccctctcctatcggagcacaatgaaagcctgtgtatcgccgtgactccgggcgcgagccagtgtcagcaaagcggctaacaacagacgagaaagagaaaggaaaatacaagctactttttttttccatctataaagcggagcaaatacaggagatagaaccagattgcttattgcgagtccagaccctcagatccactggccggggatggaatgtacaaaagtggacagaaaagtggctggacatgactcggtgcaatttgctggaagtttgtaagtttgaccatcgtttgtaaattactctcggaagagtttgtctctcttgatactgtattagaatagagccgggggtgaggaatagaaacgtaagcgggaaagaaaaaaatgtgttgaaggatctctctcagtggctagcgacttaagattgcttttcatttaaggctaggaaaccttagagggagtgaggattttaccggtgattggattagctgaagaaaaaagcatggtccaaaagtccaattactgacattgttaacagttgaaaagctgtctccctcttttgggagaagacaacatcctacagtaccccaaagaggagaaaacaccggagcgaaaggaaagggaggaaaaattaaaagccaaaagacagtctcccttgatttttgcacattttgaacagtgacttaaacatcttctgaaacagcactgttttgttttgttttggttttttatttaacctgaggaaaagtcaaggctgctggttacatagacatggtagaaatgtgtttctctgcagaaacatccccataaagaattgtcggaaacaactaggtgagggggagtcctctctattaatacctctctcaataccttttgctgtgtgtttctgtctcttgctggacaatccctgaattcttgatctaacccccagatcgtgtgtttacaaagtacctagtggctcttgtcagcttggtggaggaaaaaaaatccaccaactctgtccaacttctccagagctgtcaaatgcaattagagtaagttaatcagggtttgtttccaacttatcctccccccagttggtttctattctttctccccaccctctttttactaactcccctcccccacaacttctccacggctcccccacaacctctgaagacctctattcatgtggccctgaacactgagctcacattgtcaaaaacagacttgcctgcaatagccagcagtagcctctttccacctcaccatcccagaggcagcaatcattgtgtccggtaagatgggggacacagcgcccccgcaggcccccgcaggagggctagggggggcctctggggcggggctccttggagggggctcagtcaccccgagagtgcacagtgctatcgtggagcgcctccgggctcggatcgctgtctgccgccaacaccacctgagctgtgaaggacgatatgaacgaggtagggccgagagctcagaccgggaaagagaaagcaccttgcagctcctgagccttgtacagcatggccagggggcaaggaaagctggcaaacacaccaaggccaccgccactgctgccaccactacagcccctccaccgccccctgctgcccctcctgcggcctcccaagcagcagcaacagcagccccaccgcccccaccagactatcaccatcaccaccagcagcacctgctgaacagtagcaataatggtggcagtggtgggataaacggagagcagcagccgcccgcttcaaccccaggggaccagaggaactcagccctgattgcgctccagggttccttgaaaagaaaacaggtagttaacctatctcctgccaacagcaagcgacccaatggctttgtggacaactcatttcttgatatcaaaagaattcgtgttggggagaatctctctgcaggacaaggtggcctccaaataaacaatggacaaagtcagattatgtcagggaccttgcctatgagccaagcacccctgcgaaagactaacactctgccatcccatacacattctcctggcaatggcctgtttaacatgggcttaaaggaggtaaagaaggagccaggagagactctgtcttgcagtaagcacatggatggccaaatgacccaagagaatatttttcctaataggtacggagacgaccctggagaacaactgatggatcctgagctgcaggaactgttcaatgaactgaccaacatatctgtgcctcccatgagtgaccttgaactggagaacatgatcaatgccaccataaagcaggatgacccatttaacattgacttgggtcagcaaagccagaggagcacacctaggccctccttacccatggagaaaatagtgatcaaaagtgaatactcaccgggcttgactcagggcccctcaggctctcctcagctgaggcccccatcagctggccccgcattctccatggccaactctgccctctccacttcgtctccaatcccttcagtccctcagagccaggctcagcctcagacaggctccggagcaagccgggccttgccaagctggcaggaagtatcccatgcccagcagctcaaacagatagctgctaatcgtcagcagcatgcccggatgcagcagcaccagcagcagcaccagcctaccaactggtcagccttgccctcttctgctggaccatcaccaggtccatttgggcaggagaaaatccccagcccttcttttggtcagcagacattcagcccacagagctcccccatgcctggggtagctggcggcagcggccagtcgaaagtaatggctaactacatgtacaaggccggcccctcagcccagggtgggcacctagatgtcctcatgcagcaaaagcctcaggatctcagtcgaagttttattaacaacccgcacccagccatggagccccgtcagggcaacaccaagcctttgtttcattttaactcagatcaagcgaaccagcagatgccttctgttttgccttcccagaacaagccttctctcctacactacacccaacagcaacagcagcaacagcagcagcagcagcagcagcagcagcagcagcagcagcaacagcagcagcagcagcaacagcaacagcaacagcaacagcagagttcaatttcagctcaacaacagcaacagcagcagagctcaatttcagcccaacagcagcagcagcagcaacaacagcagcagcagcagcaacaacaacagcaacaacagcagcagcagcagcagcaacaaccatcttctcagcctgcccaatctctaccaagccagcctttgctaaggtcacctttgccacttcagcaaaagctcctacttcagcaaatgcagaatcagcccattgcaggaatgggataccaagtctcccaacaacagagacaggatcaacactctgtggtaggccagaacacaggccccagtccaagtcctaacccctgctcaaatccaaacactggaagtggttacatgaactcccagcaatcactgttgaatcagcaattgatgggaaagaagcagactctacagaggcagatcatggagcagaaacagcaacttcttctccagcagcagatgctggctgacgcggagaaaattgctccacaagatcagataaaccgacatttgtcaaggccacctccagattataaagaccaaagaagaaatgtgggcaatatgcaaccaactgctcagtattctggtggctcatccacaataagcttaaactctaaccaggctttggcaaacccagtttcaacacacaccattttaactcccaattccagcctcctgtctacttctcacgggacaagaatgccatcattatctacagcagttcagaatatggggatgtatggaaatctgccttgtaatcaacctaacacatacagtgtcacttcaggaatgaatcaattgacccaacagagaaacccaaagcaattgttagcaaatcaaaacaaccctatgatgccacggccacctaccttagggccaagtaataataacaatgtagccacttttggagctggatctgttggtaattcacaacaattgagaccaaatttaacccatagtatggcaagcatgccaccacagagaacatcaaacgtaatgatcacatccaacacaactgcaccaaactgggcctctcaagaaggaacaagcaaacagcaagaagccctgacgtctgcaggagtccgcttccccacaggtacacctgcagcctataccccaaatcagtcactgcaacaggcagtaggtagccagcaattttcccagagggcagtggctcctcctaaccagttaacaccagcagtgcaaatgagacccatgaaccaaatgagccaaacactaaatgggcaaaccatgggtcccctcaggggtctgaatctcagacccaatcagctaagcacacagattttgcctaatttgaatcagtcaggaacagggttgaatcagtcgaggacgggcatcaaccagccaccatccctgacgcccagcaattttccttcacccaaccaaagttccagggcttttcaaggaactgaccacagcagtgacttagcttttgacttcctcagccaacaaaatgataacatgggccctgccctaaacagtgatgctgatttcattgattctttattgaagacagagcctggtaatgatgactggatgaaagacatcaatcttgatgaaatcttggggaacaattcctaaagaagaaagggaagacaatttacaaactccaagcactaaaaggcagtatattacagaaactctgtagaggctgaactgttgatgttcaggtggactacatgaagataacatgcttaaaaatggaaagcagaaagtaactgcagtgatgaacattttggtccaaattcttgttttaaatcttacacctgaaagtaaaatattgggatcacttttccctgtctaaactccaggatacagtatccaatttatccaaacagaactgtggtgtcaatgtgtaattaattgtgtaaaatagccttcccaagtttctttttccctggaaaataaaaaaggtaatagaacttgtagtttatttaaaccccatgtcatgaggaggtactagttccaagcaacaaactccttaatttgctctaatagataggtatggtttaatctttccattgtgtcttttcatttaattttcctgaagcttgcaggatagattgaaatgttataggtttgtttggagtaaccaaacagtatgcaaattaagaaaaagccagagaacctagaaaacatccagtggattacagaatttcttccccatattcactcctcacttttacaattttcccacaatcctctacttcagtgggatgctgtgtctagtgattaaacaaaaatatagagctgtgcaatttgattttggcttccacaacgaatatctgaatccattccaaatgaaattttagatataacaaagacttgtcctaatcatactgaaatattggtgcacacctctctgcattagatttcacttttttaaaaaacccagtggacattgctataaataagatttatttggctacaaataacctgggatgttgcttattatgattgatgcctgctggtttgttcccaagctgagtgaaattgaacctcgtcctccctactcattttgatgactgaggctggtttataagaaaaggaagtttggagaagaaaaccgagattagaaaatatcatgttttggttggagataagaaccagggatggcaagtaccagtgtgtacaaatgtatttcacggagtttgaaggaacgcataatcaagagggaaaacaatttgtccttcattggacgtattatttggatttgggtgagcaacaaaatggaatgtggtctgttaggagcattctgtttgttcttttgtccctgatgtgatgaatcattgccacatgctagatggactcttcatatccaggttttgtccctcagggctgagcactgtattaaagagtttttgttgagtcatttaaccttagtgtccacatccagatcagctgtaaaatggggaagacgtgtgctgatttggaatgaatgcaaaatatcactatcattttcctaattacagaggagcaaaggttatcttcagccctttcagttctatgctcacatattcaaatatcaaatgtaatttagctgaagttatttaataatcaagtctttcaatatctgttcaaagaaaaagaacacactttgaaaattctgcaaagctgtctcccagtctttaaaatgtctggaagcactctccttctttacaataccaacatcactggcccagaatcttccctgtgctagtttgtaaatataaataaattacttgttttgtaaacttttgtaaagaatattttggtagaaatacttcaaacatattctttgggttatatttatacatatgtgaaataaatatactatcaaaaggttatattttatacaaaaagtaaattgctaccttttgtatgctaatatgcaaagttttgtataatatgatggtttatttttagctctacacttaaaccataggtggttgagtgggaacttttgaaaactatcaagaggcttgttagacaaatttatattctgaaacctcaataagaaagcattccaggtttcaatccttgttttttgtcctgctcccaaattcttttttaaacccatagttcttgtgtcttatttgattcttctgctgtgcacattgtattggtccttgttgcatgtagtctactgtgtgttttccgattttataaggcagcatttctccatacaaaaagaaaaaaaatgatgtacatataaacgcttttgttgtatggctcctccatgttactgtatatatctgccagcacttcccagttacactcctgtgagtcagcttatttttaccctaacataaatagtatgttttgtagtagttatcaaatttaagagataaagcaatcagaatgtttggattttcttctatcttaatgtgaatttcataattaatgtctatttattcagctattcattaaaatacaggattctttgggaaaa

SEQ ID NO: 321 - DNA, 533 bp, Homo sapiens
aagtcagtgcccgtgtctccacacgtctgcctccatcactgccatcgcgatcctgcagctatgtcctaccctgtgaccagtcagccccagtgcgccaccaccagctgctaccagacccagctcagtgactggcacacaggtctcacggactgctgcaacgacatgcctgtctgtctgtgcggcacttttgctcctctgtgccttgcctgccgcatctccgacgactttggcgagtgctgctgcgcgccctacctgcccggaggcctgcactccatccgcaccggcatgcgggagcgctaccacatccagggctccgtcgggcacgactgggcggccctcaccttttgtctgccctgcgccctctgccagatggcgcgggaactgaagatccgagagtaaggaagttccctgtcttccccgtccttttccaccagtctcgcctctggccttctctggccactcctgggagggactgcctcaccacccctgtcccgctgccagaaatacacccacaataaaaacctgaaaaccaa

SEQ ID NO: 322 - DNA, 3505 bp, Homo sapiens
acttttgttttcctgctcccagcagggttaggcttgctgaggggcaggcacaggagtcctggctgagctcatggcctgaggctgcctagcggccacggggaatggttgcaatggcggaggcagaggcaggggtggcagtggaggtccgtggactgccccctgccgtgcccgacgagctgctcactctctactttgaaaaccgccgacgctctggagggggacctgtgttgagctggcagagactgggctgtgggggcgtcctcaccttcagagagcctgcagacgccgagagggtcttggcccaggcagatcacgaactacatggtgcccagctgagcctgcggccagctccaccacgagcccctgcacgcctgctgctccaaggactgccccctggcaccacgccccagcgcttggagcagcatgtccaggccttgctgcgggcctcggggctcccagtacagccttgctgtgccttggccagcccccggccagaccgggctctggtccagttgcccaagcccctttctgaggcagatgtccgtgtcctggaggagcaggcccagaatctgggcctggaggggaccttggtgtccctggcccgggttccccaggcccgagcggtgcgtgtggtgggggatggtgcctctgtggacctgctgttgctggagttgtacctggagaatgagcgccgcagtggtggggggcccctggaggacctgcaacgcctacccgggcccctgggcactgttgcctccttccagcagtggcaagtggcagaacgagtgttgcagcaggagcaccggttgcagggctcagagctgagccttgtcccccactacgacatcctggagcccgaggagctggctgagaacaccagtggaggggaccacccgtccacccaggggcctagggctaccaagcatgctctcctgaggaccggagggttggtgacggctctgcagggtgcagggactgtgacaatgggctctggcgaggaaccagggcagtcaggggcctctctgaggacaggtcccatggtgcagggtagagggattatgacaacaggctctggccaggaaccagggcagtcagggacctctctgaggacaggtcccatggggtctctgggacaggcagagcaagtcagctcgatgcccatggggtctctggaacatgaggggctggtaagcctgaggcctgtggggttgcaggaacaggaggggcccatgagcctggggcctgtggggtctgcaggcccagtggagacctctaaggggttgctggggcaggagggcctggtggaaattgccatggactcaccagagcaagaggggctggtgggtcccatggagatcaccatggggtctctggagaaggcagggcctgtgagcccaggatgtgtgaagctggcagggcaggagggcctggtggagatggtgctattgatggagccaggggcgatgcgcttcctgcagctctaccatgaggaccttcttgcgggcctgggagacgtcgctctcttgccacttgaaggaccggatatgactggctttcggctctgtggagcccaggcttcctgccaggcggctgaggagtttctgcggagcctgctgggcagcattagctgccatgtgttgtgcctggagcacccgggcagcgccaggtttctcctgggcccagaagggcagcaccttctccaggggctggaggctcagttccagtgtgtctttgggacagagcgcctggccacagccacgttggacacaggccttgaagaggtggaccctaccgaggccctcccagtgctccctggcaacgcccacaccctgtggaccccagacagtacaggtggtgaccaggaggacgtgagcctggaggaggtccgagaactgctggccaccctggagggcctagacctagacggggaggactggctgcctcgggagctggaggaggaagggcctcaggagcagccagaggaggaggtgaccccagggcatgaggaggaggagcctgtggcccccagcactgtggcacccaggtggctggaggaggaggccgctctgcagctggccctccaccggtcactggagcctcaaggtcaggtggctgagcaggaggaggctgctgccctgcggcaagccctaaccctctccctgctggagcagcccccgttggaggcagaagagcccccagatggggggactgatggcaaggcccagctggtggtgcactcggcctttgagcaggatgtggaggagctggaccgggcgctcagggctgccttggaggtccacgtccaggaggagacggtggggccctggcgccgcacactgcctgcagagctgcgtgctcgcctggagcggtgccatggtgtgagtgttgccctgcgtggtgactgcaccatcctccgtggcttcggggcccaccctgcccgtgctgcccgccacttggtggcacttctggctggcccctgggatcagagtttggcctttcccttggcagcttcaggccctaccttggcggggcagacgctgaaggggccctggaacaacctggagcgtctggcagagaacaccggggagttccaggaggtggtgcgggccttctacgacaccctggacgctgcccgcagcagcatccgcgtcgttcgtgtggagcgcgtgtcgcacccgctgctgcagcagcagtatgagctgtaccgggagcgcctgctgcagcgatgcgagcggcgcccggtggagcaggtgctgtaccacggcacgacggcaccggcagtgcctgacatctgcgcccacggcttcaaccgcagcttctgcggccgcaacgccacggtctacgggaagggcgtgtatttcgccaggcgcgcctccctgtcggtgcaggaccgctactcgccccccaacgccgatggccataaggcggtgttcgtggcacgggtgctgactggcgactacgggcagggccgccgcggtctgcgggcgccccctctgcggggtcctggccacgtgctcctgcgctacgacagcgccgtggactgcatctgccagcccagcatcttcgtcatcttccacgacacccaggcgctgcccacccacctcatcacctgcgagcacgtgccccgcgcttcccccgacgacccctctgggctcccgggccgctccccagacacttaaccgaaggggccaccctctggcctcctgcttcccaggctcccagctccgcacaggctgatgctccccgcccccaactgtggccgcctgagctgtccccggggacgcccctgcctccctctgcgggctccagaaggcggtgtgggggatggcggtcagcagcggccgaggggggccgggctaggtcccagcctgggccgaccccaccaccaggggtcagcagagcccaggaggcgacaccgcccgcccgccgctcccagacctcgcccgagtcggctctgttgtttgaataaacgtgaacgtgaacccaggcggaagggacccgggaa

SEQ ID NO: 323 - DNA, 4129 bp, Homo sapiens
actttgaacccagttggcgggagtggctgctcgcggaggggcagtgtctgcggggccgctgtatgctgtccagcgatggatcccaccgcgggaagcaagaaggagcctggaggaggcgcggcgactgaggagggcgtgaataggatcgcagtgccaaaaccgccctccattgaggaattcagcatagtgaagcccattagccggggcgccttcgggaaagtgtatctggggcagaaaggcggcaaattgtatgcagtaaaggttgttaaaaaagcagacatgatcaacaaaaatatgactcatcaggtccaagctgagagagatgcactggcactaagcaaaagcccattcattgtccatttgtattattcactgcagtctgcaaacaatgtctacttggtaatggaatatcttattgggggagatgtcaagtctctcctacatatatatggttattttgatgaagagatggctgtgaaatatatttctgaagtagcactggctctagactaccttcacagacatggaatcatccacagggacttgaaaccggacaatatgcttatttctaatgagggtcatattaaactgacggattttggcctttcaaaagttactttgaatagagatattaatatgatggatatccttacaacaccatcaatggcaaaacctagacaagattattcaagaaccccaggacaagtgttatcgcttatcagctcgttgggatttaacacaccaattgcagaaaaaaatcaagaccctgcaaacatcctttcagcctgtctgtctgaaacatcacagctttctcaaggactcgtatgccctatgtctgtagatcaaaaggacactacgccttattctagcaaattactaaaatcatgtcttgaaacagttgcctccaacccaggaatgcctgtgaagtgtctaacttctaatttactccagtctaggaaaaggctggccacatccagtgccagtagtcaatcccacaccttcatatccagtgtggaatcagaatgccacagcagtcccaaatgggaaaaagattgccaggaaagtgatgaagcattgggcccaacaatgatgagttggaatgcagttgaaaagttatgcgcaaaatctgcaaatgccattgagacgaaaggtttcaataaaaaggatctggagttagctctttctcccattcataacagcagtgcccttcccaccactggacgctcttgtgtaaaccttgctaaaaaatgcttctctggggaagtttcttgggaagcagtagaactggatgtaaataatataaatatggacactgacacaagtcagttaggtttccatcagtcaaatcagtgggctgtggattctggtgggatatctgaagagcaccttgggaaaagaagtttaaaaagaaattttgagttggttgactccagtccttgtaaaaaaattatacagaataaaaaaacttgtgtagagtataagcataacgaaatgacaaattgttatacaaatcaaaatacaggcttaacagttgaagtgcaggaccttaagctatcagtgcacaaaagtcaacaaaatgactgtgctaataaggagaacattgtcaattcttttactgataaacaacaaacaccagaaaaattacctataccaatgatagcaaaaaaccttatgtgtgaactcgatgaagactgtgaaaagaatagtaagagggactacttaagttctagttttctatgttctgatgatgatagagcttctaaaaatatttctatgaactctgattcatcttttcctggaatttctataatggaaagtccattagaaagtcagcccttagattcagatagaagcatcaaagaatcctcttttgaagaatcaaatattgaagatccacttattgtaacaccagattgccaagaaaagacctcaccaaaaggtgtcgagaaccctgctgtacaagagagtaaccaaaaaatgttaggtcctcctttggaggtgctgaaaacgttagcctctaaaagaaatgctgttgcttttcgaagttttaacagtcatattaatgcatccaataactcagaaccatccagaatgaacatgacttctttagatgcaatggatatttcgtgtgcctacagtggttcatatcccatggctataacccctactcaaaaaagaagatcctgtatgccacatcagaccccaaatcagatcaagtcgggaactccataccgaactccgaagagtgtgagaagaggggtggcccccgttgatgatgggcgaattctaggaaccccagactaccttgcacctgagctgttactaggcagggcccatggtcctgcggtagactggtgggcacttggagtttgcttgtttgaatttctaacaggaattccccctttcaatgatgaaacaccacaacaagtattccagaatattctgaaaagagatatcccttggccagaaggtgaagaaaagttatctgataatgctcaaagtgcagtagaaatacttttaaccattgatgatacaaagagagctggaatgaaagagctaaaacgtcatcctctcttcagtgatgtggactgggaaaatctgcagcatcagactatgcctttcatcccccagccagatgatgaaacagatacctcctattttgaagccaggaatactgctcagcacctgactgtatctggatttagtctgtagcacaaaaattttccttttagtctagccttgtgttatagaatgaacttgcataattatatactccttaatactagattgatctaagggggaaagatcattatttaacctagttcaatgtgcttttaatgtacgttacagctttcacagagttaaaaggctgaaaggaatatagtcagtaatttatcttaacctcaaaactgtatataaatcttcaaagcttttttcatttatttattttgtttattgcactttatgaaaactgaagcatcaataaaattagaggacactattgagagtgagccactagcttgattttctttctcctctgatttcagttcactgttcagtttagcattaaaataataaaataatcatacagttccatttgattgtaatttacttgcatatgattaccttcaaaagctgtgttcttgagggcaatcatttaaggccatacttgtgacctcagaaatgcagctggaaggccgggcgcagtggctcacgcatgtaatcccagcactgtgggaggccgaggcaggctgatcttgaggtcaggagttcaagaccatcctggccaacataatgaaaccccatctctactgtaaatacacaaattagccgggcatgttggtgggcgcctgtagtcccagctactctggaggctgaggcaggagaatcgctggaacccaggaggaggaggttgtggtgagccaagatcgtgccactgcactccagcctgggcaacagaacaagactccgtctcaaaaaaataaaggcagctggaaaattccttcacttagtaactcctttggggaataaggaataaacaaaaagactaaggctttcacttactttactaatgatacggttttgccaccttaatttctattggtgcgtagtccacaatatgtatttgtttaaaatggtactggaggacgggtgcgatggctcatgcctgtaatcccggcactttgggaggctgaggcaggcaagtcgcttgaggcctggagtttgagaccagcctggccaacatggcaaaacctggtctctactaaaaatagaaaaattagccaggtatggtgacgcacacctgtagtcccagctacttgggaggctgaggcatgagaatcgcttgaacccaggaggtggagattgcagtgagctgagatcacatcactgcatttcagcctgggcaacagaatgagactcagtctcaaaaaaaaaaaaaatactactggaacaattaggtgtgatataatgtagcaatttgaatagcttgttcaattttaatagaaaatgtgatgctttacatcttattgtcatttatttaaaacatgcaacattatcagaaacagattggtccttaaaaaacaaaacataattttcttttgcttaataaatataactatcacaagta

SEQ ID NO: 324 - DNA, 2403 bp, Homo sapiens
gtccttcccaagaccacacccaggtccagtcattccctaggacttggcagagagctgtactcacagccaagatcacagcaaaatcagcaaagggaaaaggcatgcagagtgaagtccagaggcaaccagacagaagcatccagaatcctctcacagtggggtcacacaccccatgcttaactcccccaacaatgagttgtaacaacagtcaggtgtggtggtgtgtgcctgtagtcccagctacttgggagcctgaggcaggaggatcacttgagtccagcagttcaagactgcagtgagctatgatcataccactgcactccagcctgagtgacagagtgaaactctgtctctaaaatagggctcacctgcttgaggaaacaggaactgcctcggggcagccagccccgccccattgacgtgcagaccttgaatcgaaacccaggctcctgcaggcactggcacagctacagcgagggcctcggccatccaagggtctcccaggtgaccttccctccaccccaggaagctatgacagaggccgggaagctgcccctaccgctacccccacggctggactggtttgtgcacacccagatgggccagctggcccaagacggggtccccgagtggttccatggtgcaatctcaagagaggatgctgagaacttgctggagtcacagccactgggatcctttctcatcagggtcagtcacagccatgtgggctacacactctcctacaaagcccaaagcagctgctgccatttcatggtgaagctcttggatgatgggactttcatgatccccggggagaaggtggcccacacctcgctggacgccctggtcaccttccaccagcagaagccaattgagccgcgcagggagctgctgacacagccctgcaggcagaaggatcccgcaaacgtggattacgaggatctcttcctctactccaacgcagtggccgaggaagctgcctgcccggtgtctgcccctgaggaggcctccccaaagccagtcctgtgtcaccaatcaaaggaaaggaagccgtcagcagagatgaacagaataaccaccaaggaagccacttcctcctgccccccaaaatcccctcttggagagacccgccagaaactctggaggagcctcaaaatgctccccgagagaggccagagggtccggcagcagctaaaaagccacctcgccactgtgaacttgtcgtcactcttggatgtccggagatccacggtgatctcaggccctgggaccggaaaaggcagccaagatcactcaggggatcccacctcgggggacagaggctacacggatccctgtgtggccacatctctcaaaagcccctcacagccccaggcaccaaaagacagaaaggtccccaccaggaaggccgagaggtcggtcagctgcattgaggtgaccccaggggacaggagttggcaccaaatggtagtgagagccctatcctcccaggagtccaagccagagcaccagggcttggcagagcctgagaacgaccagctcccggaggagtaccaacaaccgccaccctttgcccctgggtactgctagagaacaggtccaccctggctctgggactcgctgccaggggctgccacactcctgaatgccttaacatttcttccatggccccacaccatggcatccgggggtcttcgggaacccgggaaatggaataaagatgtttttggggtctgttcctgcactcacccatggggtgagctggttattttagcaacaatcatcagagtgacgctgatggtttggggcaccagctatacatcagccccagtgccagaccttctattcattattttacgcctcagagcaaggccctcagggagggtcatcctccatgttttgaagaagagactgaggttcagagaggataagaggcgtgaccaaggccacagagctatgggtgtcagcaccaggatttgaagccaggtgaatccgagcccttttcccatatcatctgtttgttctgttgtctaaaagcacactgcaagccgggctcagtggctcatgcctgtagtcccagcactctgtggggccgaggcaggcagatcgcttgaggtcaggagttcgagaccagcctggccaacatggtgaaaccccgtctatactaaaaaattcaaaaattacccggacgtggtggcgcatgcctgtaatcccagctacttgggagcctgaggcgggagaattgcttgaacccgggaggcagaggttgcagtgagccgagatcgcatcactgcagtccagcctggatgacagagtgagactccatctcaaaaaataaataaataaataaaaatgaaattaaaaaataaaaaaaaaaaaaaaaaaaaaaaaaaaaaaaaaaaa

SEQ ID NO: 325 - DNA, 4087 bp, Homo sapiens
gcctctcctgactcttcacctggactctgagtcgtcttggtcccaggagccagtagtgaaggcaacagtctgcccacctgtggacaccagatcctgggagctcctggttagcaagtgagatctctgggatgtcagtgaggctggttgaagaccagaggtaaactgcagaggtcaccacccccaccatgtcccaggtgatgtccagcccactgctggcaggaggccatgctgtcagcttggcgccttgtgatgagcccaggaggaccctgcacccagcacccagccccagcctgccaccccagtgttcttactacaccacggaaggctggggagcccaggccctgatggcccccgtgccctgcatggggccccctggccgactccagcaagccccacaggtggaggccaaagccacctgcttcctgccgtcccctggtgagaaggccttggggaccccagaggaccttgactcctacattgacttctcactggagagcctcaatcagatgatcctggaactggaccccaccttccagctgcttcccccagggactgggggctcccaggctgagctggcccagagcaccatgtcaatgagaaagaaggaggaatctgaagccttggacataaagtacatcgaggtgacctccgccagatcaaggtgccacgatggcccccagcactgctccagcccctctgtcaccccgcccttcggctcccttcgcagtggtggcctcctcctttccagagacgtcccccgagagacacgaagcagcagtgagagcctcatcttctctgggaaccagggcagggggcaccagcgccctctgcccccctcagagggtctctcccctcgacccccaaattcccccagcatctcaatcccttgcatggggagcaaggcctcgagcccccatggtttgggctccccgctggtggcttctccaagactggagaagcggctgggaggcctggccccacagcggggcagcaggatctctgtgctgtcagccagcccagtgtctgatgtcagctatatgtttggaagcagccagtccctcctgcactccagcaactccagccatcagtcatcttccagatccttggaaagtccagccaactcttcctccagcctccacagccttggctcagtgtccctgtgtacaagacccagtgacttccaggctcccagaaaccccaccctaaccatgggccaacccagaacaccccactctccaccactggccaaagaacatgccagcagctgccccccatccatcaccaactccatggtggacatacccattgtgctgatcaacggctgcccagaaccagggtcttctccaccccagcggaccccaggacaccagaactccgttcaacctggagctgcttctcccagcaacccctgtccagccaccaggagcaacagccagaccctgtcagatgccccctttaccacatgcccagagggtcccgccagggacatgcagcccaccatgaagttcgtgatggacacatctaaatactggtttaagccaaacatcacccgagagcaagcaatcgagctgctgaggaaggaggagccaggggcttttgtcataagggacagctcttcataccgaggctccttcggcctggccctgaaggtgcaggaggttcccgcgtctgctcagagtcgaccaggtgaggacagcaatgacctcatccgacacttcctcatcgagtcgtctgccaaaggagtgcatctcaaaggagcagatgaggagccctactttgggagcctctctgccttcgtgtgccagcattccatcatggccctggccctgccctgcaaactcaccatcccacagagagaactgggaggtgcagatggggcctcggactctacagacagcccagcctcctgccagaagaaatctgcgggctgccacaccctgtacctgagctcagtgagcgtggagaccctgactggagccctggccgtgcagaaagccatctccaccacctttgagagggacatcctccccacgcccaccgtggtccacttcaaagtcacagagcagggcatcactctgactgatgtccagaggaaggtgtttttccggcgccattacccactcaccaccctccgcttctgtggtatggaccctgagcaacggaagtggcagaagtactgcaaaccctcctggatctttgggtttgtggccaagagccagacagagcctcaggagaacgtatgccacctctttgcggagtatgacatggtccagccagcctcgcaggtcatcggcctggtgactgctctgctgcaggacgcagaaaggatgtaggggagagactgcctgtgcacctaaccaacacctccaggggctcgctaaggagcccccctccaccccctgaatgggtgtggcttgtggccatattgacagaccaatctatgggactagggggattggcatcaagttgacacccttgaacctgctatggccttcagcagtcaccatcatccagaccccccgggcctcagtttcctcaatcatagaagaagaccaatagacaagatcagctgttcttagatgctggtgggcatttgaacatgctcctccatgattctgaagcatgcacacctctgaagacccctgcatgaaaataacctccaaggaccctctgaccccatcgacctgggccctgcccacacaacagtctgagcaagagacctgcagcccctgtttcgtggcagacagcaggtgcctggcggtgacccacggggctcctggcttgcagctggtgatggtcaagaactgactacaaaacaggaatggatagactctatttccttccatatctgttcctctgttccttttcccactttctgggtggctttttgggtccacccagccaggatgctgcaggccaagctgggtgtggtatttagggcagctcagcagggggaacttgtccccatggtcagaggagacccagctgtcctgcacccccttgcagatgagtatcaccccatcttttctttccacttggtttttatttttatttttttttgagacagagtctcactgtcacccaggctgaactgcagtggtgtgatctaggctcactgcaacctccacctcccaggttcaagcaattatcctgcctcaggctcccaagtagctgggattacaggcatgtgcaactcacccagctaattttgtatttttagtagagacagggtttcaccatgttggccaggctggtcttgaactcctgaccgcaggtaatccacctgcttcggcctcccaaagtgctgggattacaggcgcaagccacccagcccagcttctttccattccttgataggcgagtattccaaagctggtatcgtagctgccctaatgttgcatattaggcggcgggggcagagataagggccatctctctgtgattctgcctcagctcctgtcttgctgagccctcccccaacccacgctccaacacacacacacacacacacacacacacacacacacacacacacacacacacacacacacgcccctctactgctatgtggcttcaaccagcctcacagccacacgggggaagcagagagtcaagaatgcaaagaggccgcttccctaagaggcttggaggagctgggctctatcccacacccacccccaccccacccccacccagcctccagaagctggaaccatttctcccgcaggcctgagttcctaaggaaaccaccctaccggggtggaagggagggtcagggaagaaacccactcttgctctacgaggagcaagtgcctgccccctcccagcagccagccctgccaaagttgcattatctttggccaaggctgggcctgacggttatgatttcagccctgggcctgcaggagaggctgagaccagcccacccagccagtggtcgagcactgccccgccgccaaagtctgcagaatgtgagatgaggttctcaaggtcacaggccccagtcccagcctgggggctggcagaggcccccatatactctgctacagctcctatcatgaaaaataaaatgtttgtctttgcaaaa

SEQ ID NO: 326 - DNA, 3164 bp, Homo sapiens
agtctcccgccgccgccgccgctgccggacgcgcagagcgaggggcggctggaccgacggctgccgggccgagcgcacagagtcgcggcgcagggggcgtccccggccgggacgcgggtcgcgtcgttgtcctccgcgagcgtccggattgcaggctgtctgtccccagaccccagagcacgtccggcaccaccatgactgggctgttgaagaggaaatttgaccagctggatgaggacaactcctcggtctcctcctcctcctcttcctctgggtgccagtctcgctcctgctccccaagctcttctgtctcccgtgcctgggactcagaggaggaaggcccctgggatcagatgcccctgcctgaccgtgacttctgcggccccagaagtttcacccccctgtctatcctgaagcgggctcgccgggagcgcccaggccgtgtagcctttgatgggatcaccgtcttctacttcccccgctgccagggcttcaccagtgtgcccagccgtggtggctgtactctgggtatggcccttcgccacagtgcttgccgtcgcttctctttggctgagtttgcgcaggagcaagcccgtgcacggcacgagaagctccgccagcgcttgaaagaggagaagttggagatgctgcagtggaagctttcggcagctggggtaccccaggcagaggcagggctgccacctgtggtggatgccattgatgacgcctctgtggaggaggacttggcagtcgctgtggcaggtggccggttggaagaagtgagcttcctacagccctacccagcccggcgacgtcgagctctgctgagggcttcaggtgtgcgaaggatcgatcgggaggagaagcgggagctgcaggcactgcgccaatcccgggaggattgtggctgtcactgcgataggatctgcgaccctgagacctgcagctgcagcctggcaggcatcaagtgccagatggaccacacagcattcccctgtggctgctgcagggagggctgtgagaaccccatgggccgtgtggaatttaatcaggcaagagttcagacccatttcatccacacactcacccgcctgcagttggaacaggaggctgagagctttagggagctggaggcccctgcccagggcagcccacccagccctggtgaggaggccctggtccctactttcccactggccaagccccccatgaacaatgagctgggagacaacagctgcagcagcgacatgactgattcttctacagcatcttcatcagcatcgggcactagtgaggctcctgactgccccacccacccaggcctgcctggccctggcttccagcctggcgttgatgatgacagcctggcacgcatcttgagtttcagtgactctgacttcggtggggaggaggaggaagaggaggaagggagcgtggggaacctggacaacctcagctgcttccatccagctgacatctttggtactagtgaccctggtggcctggccagctggacccacagctattctggctgtagcttcacatcaggcgtcctggatgagaatgccaacctggatgccagctgcttcctaaatggtggccttgaagggtcaagggaaggcagccttcctggcacctcagtgccacccagcatggacgctggccggagtagctcagtggatctcagcttgtcttcttgtgactcctttgagttactccaggctctgccagattatagtctggggcctcactacacatcacagaaggtgtctgacagcctggacaacatcgaggcacctcacttccccctgcctggcctgtctccacctggggatgccagcagttgcttcctggagtccctcatgggcttctccgagccagccgccgaagccctagatccctttattgacagccagtttgaggacactgtcccagcatctctaatggagcctgtgccggtgtgaggaccaggatgtcttttcccagccccaagagacctgttgctgctttcttgtaattatggggctccccagagtctgcgtaacagtctcccactggctggctcacccacaggtgccatgtgcacactcctggttttcaaacaattctctggatttatttatttgttttaacttttctgtgctgaagagaggactggggggagggggcttcccctttcagctgcccggccccccacacccacagcttgctcttctatctccacaacgtgagcctggaagaggagaaaatgtggctcctctggagcttggcagaccacttttcggtctttgcgtgatgttccttagcccaaagacggtgagacagggctgaaatcaggtggcttctgccaccctgagccctagacccatgggtggctaaatccactggactgtgaagactataatttatttccataatttatttggagattgaggaggctttggttgcacttctttggctggtgggtaatgccaggggtggggtgggcacaggccctcaagagccccttttgccttgtagtcctacaccttgccctgcctgggctttggtgcagactaggtgtggatttgagctctgtgatctatgtctgctgcctggctcctagatggctctgtgggcaggtgctggccaaggacatcatctaggcagggggagagcctgggctgaacagctgtgaccaaaactcccttctgccccaccctgccccctccacttcctgccctctgttccatcttcccccttcccaaaggccacagcctttattccaggcccagggatgtaggagggggaaggaggaaacaggaagcccagagagggcaaagggcctacctcggggcgcgaaccatgccccagactattatctcagggctttctgggcactgcacttcagcgtggcccacctgcccatgccctgaggccagttggcgaggggtggctcctgagggtttttataccctttgtttgctaatgtttaattttgcatcataatttctacattgtccctgagtgtcagaactataatttattccatttctctctgtgtctgtgccaagaaacgcaggctctgggcctgccccttgcccaggaggccttgccagcctgtgtgcttgtgggaacaccttgtacctgagcttacaggtaccaataaagaggctttattttta

SEQ ID NO: 327 - DNA, 3624 bp, Homo sapiens
aagaatttcctgcggttcctctaggaaaattcctttgtgcagatcaggcccgtggattggtgagtgaatcctaaccacgtcttccctggcctgtcttcactcttctccccagaatcaccacttctgcactggtgtctgaaggtgtattgagtgattttgtggagggcagaagtaggaagtctttgggacaaaactgtatttaccttgggatctgtgaacaagaggaacctcagcagccaggacaggcaggagcagtggaatagctactatggcttctggaatcctggttaatgtaaaggaggaggtgacctgccccatctgcctggaactcctgacacaacccctgagcctggactgcggccacagcttctgccaagcatgcctcactgcaaaccacaagaagtccatgctagacaaaggagagagtagctgccctgtgtgccggatcagttaccagcctgagaacatacggcctaatcggcatgtagccaacatagtggagaagctcagggaggtcaagttgagcccagaggggcagaaagttgatcattgtgcacgccatggagagaaacttctactcttctgtcaggaggacgggaaggtcatttgctggctttgtgagcggtctcaggagcaccgtggtcaccacacgttcctcacagaggaggttgcccgggagtaccaagtgaagctccaggcagctctggagatgctgaggcagaagcagcaggaagctgaagagttagaagctgacatcagagaagagaaagcttcctggaagactcaaatacagtatgacaaaaccaacgtcttggcagattttgagcaactgagagacatcctggactgggaggagagcaatgagctgcaaaacctggagaaggaggaggaagacattctgaaaagccttacgaactctgaaactgagatggtgcagcagacccagtccctgagagagctcatctcagatctggagcatcggctgcaggggtcagtgatggagctgcttcagggtgtggatggcgtcataaaaaggacggagaacgtgaccttgaagaagccagaaacttttccaaaaaatcaaaggagagtgtttcgagctcctgatctgaaaggaatgctagaagtgtttagagagctgacagatgtccgacgctactggggtaaggagaagtcacattatcataagccaccctgcggcttatcattattattatctttatcttttagaattttatgttctctattaggctcatgttttaagatttatgattctccttccaagacacacataacttacccctccttataacttctaaacaaggttcctcccagttttctctcaagtctttatcaagatttctctcatatcacaaataaagttacattatatcccttagctgacctgttaatttttctacagttgatgtgacagtggctccaaacaacatttcatgtgctgtcatttctgaagataagagacaagtgagctctccgaaaccacagataatatatggggcacgagggacaagataccagacatttgtgaatttcaattattgtactggcatcctgggctctcaaagtatcacatcagggaaacattactgggaggtagacgtgtccaagaaaactgcttggatcctgggggtatgtgctggcttccaacctgatgcaatgtgtaatattgaaaaaaatgaaaattatcaacctaaatacggctactgggttatagggttagaggaaggagttaaatgtagtgctttccaggatagttccttccatactccttctgttcctttcattgtgcccctctctgtgattatttgtcctgatcgtgttggagttttcctagactatgaggcttgcactgtctcattcttcaatatcacaaaccatggatttctcatctataagttttctcactgttctttttctcagcctgtatttccatatttaaatcctagaaaatgtggagtccccatgactctgtgctcaccaagctcttgaaccttcttacacactcagccccttctgtacagcacctcttgtccaggtgcatctcatacacctgaactcatttgcatcattttaaccatcttttccttgctgtctcccttctttctatttgaacgtccttcactcatcagtaaaatgtaataattgccttgtgccatattgtccccaatattttattgacatttgatagcaatttttttcatcattttccgtactcctaaggaaaactgacctatacctcataaaatgagaccgctatttaggtattacttctgccagatatttatcacccaattgcctctgacactgactaagaagatgaagaaaagcttttcaacagcctttctatatcatcgtgtgataattgttcaccaatgaatgagtccttagccctgtgtcagtttaccctcgatgcccttatttgtgagttaaagagaaaatatcataaatggtatactcttaagtatagaggttttgtatctagaggatctcagttcaactcctgtctctccatataccagcagtgtaactgtgaataacatacttaaatggctgtgcttatttccttttcttttcttttttctttttttttttttttgagatgaagttttgctcttgttccccaggctggagtgcaatggcacgatctcggttcactgcaacctccacctctcagattcaagcaattctcctgcctcagcctcccaagtagctgggattacaggtgcccaccaccacccctggctaaatttgtattttcagtagagacggggtttccccatgttggttaggctcgtctagaacctctgacctcaggtgatccacccgcctcggcctcccaaagtgctgggattacaggcgtgagccacggcgcccagcctgtgcttattttcttaaaataatttttgtattaaaaacttcacattaaataagtgctaatgttttattgcatagtagggtgactagagttaacaataacctattgcatatattttgaaatagctagaagagaggattttgaaagttctcaacacaaagaaatgacacatatttgaggtgatggatatgctaattaccctggttcggttattacgcaatgtatacatgtatcaaaacatcacactgtaccacataaatatgtatatttattatttgtcaattaaaagcaaaataaaacaaaaaaccttcatctaatactttggatcattgtgaaaaaataaattcctgaagtataaagcatctatctaagtgtcttgatctaataagtacttgttctacaaattattgaaaaacataaactctgttaatgtctcatggaacaggttgtgccttcagggaaactaggattggatttactaaattctcattttttagatctcagatactactgtcaaaatgacttcaattctgccttctatatataatacacacatatatttaggattttattgtaattctagtgttgctacatattagtctttatcaaacaaactgaattatgtgggaatcagtttattaattgtaaaaaataattataataaaattagctgatgtagttttttaaaagttaaacgagttttttgaatagcttcactcatttctagc

SEQ ID NO: 328 - DNA, 2890 bp, Homo sapiens
gtttacggagccggtgtgaacgtcggacttcaattcccacaatgcctggcgcaaacgcctagttttggcctgggtaaccgagaggtgaccgccatcttgcgtacggagatgtcttatggtgaaattgaagaattctgcttggtcagaatcgtgatggcattgtgttcagcactgatgactattttcaccatcaagatgggtacagcaaaacaagctatcgatcagggaagatctccagttataatagataacactaatatacaagcttgggaaatgaagccatatgtggaagtggccataggaaaaggatacagagtagagtttcatgaacctgaaacttggtggaaatttgatcctgaagaattagaaaagaggaataaacatggtgtgtctcgaaagaagattgctcagatgttggatcgttatgaatatcaaatgtccatttctattgtaatgaattcagtggaaccatcacacaaaagcacacaaagacctcctcctccacaggggagacagagagaaagagttttgaagaaaactgggcataggctcagcaaaaccaaacagaagaggaacagaaaaagaaacaaaaagcagaacagtcagaatagaatcatggaggaaaactcattagaattcttaagtgatcttacaccgggagatcaggacccatctcagagtgaagaggaagacattgaaaagaccagaagagaatcagaatatcccttcattgatggtctacaaaatgaagtcggagattttgtgactggatataaagaaaaaagatggaaaaataaagatcctaaagacagtttccaaaacgttatgtctatagttgaattagacaacacaccaaagaattacctctctaaggaaggtgataacttgtttgtaagtttgttactgaggccaaatgaaatctccgttacttgtccaatactgactcaaaacctttcctgtgtaacaactgatgactgctctggcatgaaggtagaaaagcatattagaaataggcataccatagcattagacacccaggacctttctgcggaaacttcatgcttatttatgaagaagagagaaatagtagataaaaatctctcacatgaacccattctgtgccatcaacatggaatcagaatgtcagataaagttttaagagaggaacaagtgtatacaactaaaatcaatcactgggcttttttcacaaccaatttatctgatgaagatttacagctgggctctgacagacagccctattttggtagctggcctgcaggacctcataagtttatatgtgaacagagaccaaagaaagatagagcatgtaagttggctggtcctgacagcagggggcaatggattcaaatgatcttcacttcggtggcagcatcagaaccaggaaacaatccagaaatattgacagacaaactactgataggaaatgaagatttttcacctccacctgaaactatggattcattcatagaaacaaacctcttcagaagctgcttacctcaaccggatataccaaagaatgccttagaatcaacaaaaaataagaaaaggaggaagaaaaggattttcaatttggtaccaaattttgacttattaggacagagtcgtatcggtgtaaaagaaagggagaaatgtgacctgttaacaaaaaaccatggactaaaaattactttgggagaagaaaaagatagaatttcagaaaggaacagtgaagaggagaataaacaaaaacttatgacctttgatcatcatccattgtggttttaccttgatattatcaaagctacccctttaaatattgatggacagcgttattctcattgcctgtcatttaacagactaaggtgctctgcatctttatacaaaaattatattccttcttttgtgctacataatttatctagtatttggaagccatcttttacaaacaagaaactgtttttgactttcgaatctcagacaagagtaggtaataaactaaatgatgcagggtttatttctccagaaattttacatagtcatcctgatacttcgtgctctttgggagtcacttctgattttcactttttaaatgaaaggtttgatagaaagctgaaaagatgggaagaacctaaggaattaccagctgaggacagccaagacttaacaagcactgactaccgttcccttgagctaccattatcacaagggtttgcctttcaattagtaaagctttttggatctccaggcgttccaatggaatccttgttgcctgatgactatgtggttccccttgactggaagacactaaagatgatctacttgcaatggaagatgtcagtggagaaaagacagaagaagattggttgaaaaatgaaaattccttgaactttgagttctgctgtcttcatggtactgctgaagatcatgatcacggagaaaagtcagagtgctcagtgccaacccaagggattctttccagagacgtacccgttggataccaaaattagtttggataatctgttcaaccattcttgataagttatctgaataataaaaaaactcaacagaggaggtaacaatttgaacattttattgtctaatttgaagatgtatgccatactttgtttgatagaagaaagtaaggcacagaaaacttgagtaccttatttttaaaactgcattaggattaaaaggttagcccctatatccaagtattggtctgagatcccatttctagaattctgaaatccaaaaagctctgaaaatcaatagttatttttccaaatgtattcattgtggtaaaatacaccaatataaaatttaccatcttaaccacttttaagtgtgttataaatacattcatgctaccatcaaaaaaaaaaaaaaaaaa

SEQ ID NO: 329 - DNA, 1851 bp, Homo sapiens
ctctccagaggcgggccctgagccggcacctcccctttcggacagctcaagggactcagccaactggctcacgcctccccttcagcttctcttcacgcactccaagatctaaaccgagaatcgaaactaagctggggtccatggagcctgcacccgcccgatctccgaggccccagcaggaccccgcccggccccaggagcccaccatgcctccccccgagaccccctctgaaggccgccagcccagccccagccccagccctacagagcgagcccccgcttcggaggaggagttccagtttctgcgctgccagcaatgccaggcggaagccaagtgcccgaagctgctgccttgtctgcacacgctgtgctcaggatgcctggaggcgtcgggcatgcagtgccccatctgccaggcgccctggcccctaggtgcagacacacccgccctggataacgtctttttcgagagtctgcagcggcgcctgtcggtgtaccggcagattgtggatgcgcaggctgtgtgcacccgctgcaaagagtcggccgacttctggtgctttgagtgcgagcagctcctctgcgccaagtgcttcgaggcacaccagtggttcctcaagcacgaggcccggcccctagcagagctgcgcaaccagtcggtgcgtgagttcctggacggcacccgcaagaccaacaacatcttctgctccaaccccaaccaccgcacccctacgctgaccagcatctactgccgaggatgttccaagccgctgtgctgctcgtgcgcgctccttgacagcagccacagtgagctcaagtgcgacatcagcgcagagatccagcagcgacaggaggagctggacgccatgacgcaggcgctgcaggagcaggatagtgcctttggcgcggttcacgcgcagatgcacgcggccgtcggccagctgggccgcgcgcgtgccgagaccgaggagctgatccgcgagcgcgtgcgccaggtggtagctcacgtgcgggctcaggagcgcgagctgctggaggctgtggacgcgcggtaccagcgcgactacgaggagatggccagtcggctgggccgcctggatgctgtgctgcagcgcatccgcacgggcagcgcgctggtgcagaggatgaagtgctacgcctcggaccaggaggtgctggacatgcacggtttcctgcgccaggcgctctgccgcctgcgccaggaggagccccagagcctgcaagctgccgtgcgcaccgatggcttcgacgagttcaaggtgcgcctgcaggacctcagctcttgcatcacccaggggaaagatgcagctgtatccaagaaagccagcccagaggctgccagcactcccagggaccctattgacgttgacctgaggaacgcgttgtggtgatcagcagctcggaagactcagatgccgaaaactcgtcctcccgagagctggatgacagcagcagtgagtccagtgacctccagctggaaggccccagcaccctcagggtcctggacgagaaccttgctgacccccaagcagaagacagacctctggttttctttgacctcaagattgacaatgaaagtgggttctcctggggctacccccacccctttctaatttagtctctgagtcccaaaaagaagtgcaggcagagccatctgccaggcccaggagagctctgagctctggccaacaactgcagccaggctgggcagagcactccggctcacctgggctcctggcgtgtcatttgctggcttgaataaagatgtccgccttatccagtgcctgagtgtgcgagagaggcagatgcctccaaaaaaaaaaaaaaaaa

SEQ ID NO: 330 - DNA, 968 bp, Homo sapiens
atactttcagtttcagtcacacaagaagggaggagagaaaagccatggccgacaaggtcctgaaggagaagagaaagctgtttatccgttccatgggtgaagctcctcaggcagtgcaggacaacccagctatgcccacatcctcaggctcagaagggaatgtcaagctttgctccctagaagaagctcaaaggatatggaaacaaaagtcggcagagatttatccaataatggacaagtcaagccgcacacgtcttgctctcattatctgcaatgaagaatttgacagtattcctagaagaactggagctgaggttgacatcacaggcatgacaatgctgctacaaaatctggggtacagcgtagatgtgaaaaaaaatctcactgcttcggacatgactacagagctggaggcatttgcacaccgcccagagcacaagacctctgacagcacgttcctggtgttcatgtctcatggtattcgggaaggcatttgtgggaagaaacactctgagcaagtcccagatatactacaactcaatgcaatctttaacatgttgaataccaagaactgcccaagtttgaaggacaaaccgaaggtgatcatcatccaggcctgccgtggtgataatgtttcttggagacatcccacaatgggctctgtttttattggaagactcattgaacatatgcaagaatatgcctgttcctgtgatgtggaggaaattttccgcaaggttcgattttcatttgagcagccagatggtagagcgcagatgcccaccactgaaagagtgactttgacaagatgtttctacctcttcccaggacattaaaataaggaaactgtatgaatgtctgtgggcaggaagtgaagagatccttctgtaaaggtttttggaattatgtctgctgaataataaacttttttgaaataataaatctggtagaaaaatgaaaaaaaaaaa

SEQ ID NO: 331 - DNA, 1395 bp, Homo sapiens
actctgaggctctttccaacgctgtaaaaaaggacagaggctgttccctatggcagaagcctttgtgatctcacctgttggaatgcactaatgttttctgagccccttaaatatcttgtctacattcttttaagaagctcttcaccaactgtcagaaggcaaccacagaaaaaagccacttaaggtgttggaatccctgggcaaagatttcctcactggtgttttggataacttggtggaacaaaatgtactgaactggaaggaagaggaaaaaaagaaatattacgatgctaaaactgaagacaaagttcgggtcatggcagactctatgcaagagaagcaacgtatggcaggacaaatgcttcttcaaaccttttttaacatagaccaaatatcccccaataaaaaagctcatccgaatatggaggctggaccacctgagtcaggagaatctacagatgccctcaagctttgtcctcatgaagaattcctgagactatgtaaagaaagagctgaagagatctatccaataaaggagagaaacaaccgcacacgcctggctctcatcatatgcaatacagagtttgaccatctgcctccgaggaatggagctgactttgacatcacagggatgaaggagctacttgagggtctggactatagtgtagatgtagaagagaatctgacagccagggatatggagtcagcgctgagggcatttgctaccagaccagagcacaagtcctctgacagcacattcttggtactcatgtctcatggcatcctggagggaatctgcggaactgtgcatgatgagaaaaaaccagatgtgctgctttatgacaccatcttccagatattcaacaaccgcaactgcctcagtctgaaggacaaacccaaggtcatcattgtccaggcctgcagaggtgcaaaccgtggggaactgtgggtcagagactctccagcatccttggaagtggcctcttcacagtcatctgagaacctagaggaagatgctgtttacaagacccacgtggagaaggacttcattgctttctgctcttcaacgccacacaacgtgtcctggagagacagcacaatgggctctatcttcatcacacaactcatcacatgcttccagaaatattcttggtgctgccacctagaggaagtatttcggaaggtacagcaatcatttgaaactccaagggccaaagctcaaatgcccaccatagaacgactgtccatgacaagatatttctacctctttcctggcaattgaaaatggaagccacaagcagcccagccctccttaatcaacttcaaggagcaccttcattagtacagcttgcatatttaacattttgtatttcaataaaagtgaagacaaacgaa

SEQ ID NO: 332 - DNA, 1924 bp, Homo sapiens
gagaagcccaggcagttgaggacaggagagagaaggctgcagacccagagggagggaggacagggagtcggaaggaggaggacagaggagggcacagagacgcagagcaagggcggcaaggaggagaccctggtgggaggaagacactctggagagagagggggctgggcagagatgaagttccaggggcccctggcctgcctcctgctggccctctgcctgggcagtggggaggctggccccctgcagagcggagaggaaagcactgggacaaatattggggaggcccttggacatggcctgggagacgccctgagcgaaggggtgggaaaggccattggcaaagaggccggaggggcagctggctctaaagtcagtgaggcccttggccaagggaccagagaagcagttggcactggagtcaggcaggttccaggctttggcgtagcagatgctttgggcaacagggtcggggaagcagcccatgctctgggaaacactgggcacgagattggcagacaggcagaagatgtcattcgacacggagcagatgctgtccgcggctcctggcagggggtgcctggccacaatggtgcttgggaaacttctggaggccatggcatctttggctctcaaggtggccttggaggccagggccagggcaatcctggaggtctggggactccgtgggtccacggataccccggaaactcagcaggcagctttggaatgaatcctcagggagctccctggggtcaaggaggcaatggagggccaccaaactttgggaccaacactcagggagctgtggcccagcctggctatggttcagtgagagccagcaaccagaatgaagggtgcacgaatcccccaccatctggctcaggtggaggctccagcaactctgggggaggcagcggctcacagtcgggcagcagtggcagtggcagcaatggtgacaacaacaatggcagcagcagtggtggcagcagcagtggcagcagcagtggcggcagcagtggcggcagcagtggtggcagcagtggcaacagtggtggcagcagaggtgacagcggcagtgagtcctcctggggatccagcaccggctcctcctccggcaaccacggtgggagcggcggaggaaatggacataaacccgggtgtgaaaagccagggaatgaagcccgcgggagcggggaatctgggattcagaactctgagacgtctcctgggatgtttaactttgacactttctggaagaattttaaatccaagctgggtttcatcaactgggatgccataaacaagaaccaggtcccgccccccagcacccgagccctcctctacttcagccgactctgggaggatttcaaacagaacactcctttcctcaactggaaagcaattattgagggtgcggacgcgtcatcactgcagaaacgtgcaggcagagacgatcagaactacaattacaaccagcatgcgtatcccactgcctatggtgggaagtactcagtcaagacccctgcaaaggggggagtctcaccttcttcctcggcttcccgggtgcaacctggcctgctgcagtgggtgaagttttggtaggcaatttcttgcaaccaccaccgaggccccgaaaagcactggtcgtcagggagctcctccccttggcccccagcctgtgccagccctggcccggctgccacacctctgtttcctaggctggggacccagcttgtctctccttgtttcttcccactgcactgtggtgcttcagtggccaccagcctcgtcacatacaccagcatctttctgtacctcctccctttggtgacctgaagtcactgtgacagttctccaggaaggaggagcttcctacttttgagtttctctgtggaaataaaacatgaatcttgtttcccta

SEQ ID NO: 333 - DNA, 758 bp, Homo sapiens
acacaagaagggtaggagagaaaagccatggccgacaaggtcctgaaggagaagagaaagctgtttatccattccatgggtgaaggtacaataaatggcttactggatgaattattacagacaagggtgctgaaccaggaagagatggagaaagtaaaacgtgaaaatgctacagttatggataagacccgagctttgattgactccgttattccgaaaggggcacaggcatgccaaatttgcatcacatacatttgtgaagaagacagttacctggcagagacgctgggactctcagcaggtccgatacctggaaattagcttagtacacaagactcccaattactattttcttccttcccagctcttcaggcagtgcaggacaacccagctatgcccacatgctcaagcccagaaggcagaatcaagctttgctttctagaagacgctcaaaggatatggaaacaaaagttgcagaggtgccatgttcagaatacaataataaagtggagtgaaagatatacttcaggcagttttgaaatgcagtggctttttcttagaaccaattttattgagcggttctggaggaacatacttctgctccccttgcataaaggatctctatatcctagaatcccaggtttaggtaaagagttgcaaactggaactcataaattatcatagtcttcacccagtctgtctcttagaatttatttcccactgacacaaacaagccattttgtctgcttgtataaccc

SEQ ID NO: 334 - DNA, 3304 bp, Homo sapiens
attcggggggcaagcggcgggaggggaaacgtgcgcggccgaaggggaagcggagccggcgccggctgcgcagaggagccgctctcgccgccgccacctcggctgggagcccacgaggctgccgcatcctgccctcggaacaatgggactcggcgcgcgaggtgcttgggccgcgctgctcctggggacgctgcaggtgctagcgctgctgggggccgcccatgaaagcgcagccatggcggcatctgcaaacatagagaattctgggcttccacacaactccagtgctaactcaacagagactctccaacatgtgccttctgaccatacaaatgaaacttccaacagtactgtgaaaccaccaacttcagttgcctcagactccagtaatacaacggtcaccaccatgaaacctacagcggcatctaatacaacaacaccagggatggtctcaacaaatatgacttctaccaccttaaagtctacacccaaaacaacaagtgtttcacagaacacatctcagatatcaacatccacaatgaccgtaacccacaatagttcagtgacatctgctgcttcatcagtaacaatcacaacaactatgcattctgaagcaaagaaaggatcaaaatttgatactgggagctttgttggtggtattgtattaacgctgggagttttatctattctttacattggatgcaaaatgtattactcaagaagaggcattcggtatcgaaccatagatgaacatgatgccatcatttaaggaaatccatggaccaaggatggaatacagattgatgctgccctatcaattaattttggtttattaatagtttaaaacaatattctctttttgaaaatagtataaacaggccatgcatataatgtacagtgtattacgtaaatatgtaaagattcttcaaggtaacaagggtttgggttttgaaataaacatctggatccttatagaccgttcatacaatggttttagcaagttcatagtaagacaaacaagtcctatctttttttttttggctggggtgggggcattggtcacatatgaccagtaattgaaagacgtcatcactgaaagacagaatgccatctgggcatacaaataagaagtttgtcacagcactcaggattttgggtatcttttgtagctcacataaagaacttcagtgcttttcagagctggatatatcttaattactaatgccacacagaaattatacaatcaaactagatctgaagcataatttaagaaaaacatcaacattttttgtgctttaaactgtagtagttggtctagaaacaaaatactccaagaaaaagaaaattttcaaataaaacccaaaataatagctttgcttagccctgttagggatccattggagcattaaggagcacatatttttattaacttcttttgagctttcaatgttgatgtaatttttgttctctgtgtaatttaggtaaactgcagtgtttaacataataatgttttaaagacttagttgtcagtattaaataatcctggcattatagggaaaaaacctcctagaagttagattatttgctactgtgagaatattgtcaccactggaagttactttagttcatttaattttaattttatattttgtgaatattttaagaactgtagagctgctttcaatatctagaaatttttaattgagtgtaaacacacctaactttaagaaaaagaaccgcttgtatgattttcaaaagaacatttagaattctatagagtcaaaactatagcgtaatgctgtgtttattaagccagggattgtgggacttcccccaggcaactaaacctgcaggatgaaaatgctatattttctttcatgcactgtcgatattactcagatttggggaaatgacatttttatactaaaacaaacaccaaaatattttagaataaattcttagaaagttttgagaggaatttttagagaggacatttcctccttcctgatttggatattccctcaaatccctcctcttactccatgctgaaggagaagtactctcagatgcattatgttaatggagagaaaaagcacagtattgtagagacaccaatattagctaatgtattttggagtgttttccattttacagtttatattccagcactcaaaactcagggtcaagttttaacaaaagaggtatgtagtcacagtaaatactaagatggcatttctatctcagagggccaaagtgaatcacaccagtttctgaaggtcctaaaaatagctcagatgtcctaatgaacatgcacctacatttaataggagtacaataaaactgttgtcagcttttgttttacagagaacgctagatattaagaattttgaaatggatcatttctacttgctgtgcattttaaccaataatctgatgaatatagaaaaaaatgatccaaaatatggatatgattggatgtatgtaacacatacatggagtatggaggaaattttctgaaaaatacatttagattagtttagtttgaaggagaggtgggctgatggctgagttgtatgttactaacttggccctgactggttgtgcaaccattgcttcatttctttgcaaaatgtagttaagatatactttattctaatgaaggccttttaaatttgtccactgcattcttggtatttcactacttcaagtcagtcagaacttcgtagaccgacctgaagtttctttttgaatacttgtttctttagcactttgaagatagaaaaaccactttttaagtactaagtcatcatttgccttgaaagtttcctctgcattgggtttgaagtagtttagttatgtctttttctctgtatgtaagtagtataatttgttactttcaaatacccgtactttgaatgtaggtttttttgttgttgttatctataaaaattgagggaaatggttatgcaaaaaaatattttgctttggaccatatttcttaagcataaaaaaaatgctcagttttgcttgcattccttgagaatgtatttatctgaagatcaaaacaaacaatccagatgtataagtactaggcagaagccaattttaaaatttccttgaataatccatgaaaggaataattcaaatacagataaacagagttggcagtatattatagtgataattttgtattttcacaaaaaaaaagttaaactcttcttttctttttattataatgaccagcttttggtatttcattgttaccaagttctatttttagaataaaattgttctccttctaaaa

SEQ ID NO: 335 - DNA, 6141 bp, Homo sapiens
aatttcggttctcacagactcttacttggatgtctgtaaatccggctggactttcagcttctaagaacagtccgtttctcgaggatccaggcgcaggaggacagagcaatgggtgagagaactcttcacgctgcagtgcccacaccaggttatccagaatctgaatccatcatgatggcccccatttgtctagtggaaaaccaggaagagcagctgacagtgaattcaaaggcattagagattcttgacaagatttctcagcccgtggtggtggtggccattgtagggctataccgcacaggaaaatcctatctcatgaatcgtcttgcaggaaagcgcaatggcttccctctgggctccacggtgcagtctgaaactaagggcatctggatgtggtgtgtgccccacctctctaagccaaaccacaccctggtccttctggacaccgagggcctgggcgatgtagaaaagagtaaccctaagaatgactcgtggatctttgccctggctgtgcttctaagcagcagctttgtctataacagcgtgagcaccatcaaccaccaggccctggagcagctgcactatgtgactgagctagcagagctaatcagggcaaaatcctgccccagacctgatgaagctgaggactccagcgagtttgcgagtttctttccagactttatttggactgttcgggattttaccctggagctaaagttagatggaaaccccatcacagaagatgagtacctggagaatgccttgaagctgattccaggcaagaatcccaaaattcaaaattcaaacatgcctagagagtgtatcaggcatttcttccgaaaacggaagtgctttgtctttgaccggcctacaaatgacaagcaatatttaaatcatatggacgaagtgccagaagaaaatctggaaaggcatttccttatgcaatcagacaacttctgttcttatatcttcacccatgcaaagaccaagaccctgagagagggaatcattgtcactggaaagcggctggggactctggtggtgacttatgtagatgccatcaacagtggagcagtaccttgtctggagaatgcagtgacagcactggcccagcttgagaacccagcggctgtgcagagggcagccgaccactatagccagcagatggcccagcaactgaggctccccacagacacgctccaggagctgctggacgtgcatgcagcctgtgagagggaagccattgcagtcttcatggagcactccttcaaggatgaaaaccatgaattccagaagaagcttgtggacaccatagagaaaaagaagggagactttgtgctgcagaatgaagaggcatctgccaaatattgccaggctgagcttaagcggctttcagagcacctgacagaaagcattttgagaggaattttctctgttcctggaggacacaatctctacttagaagaaaagaaacaggttgagtgggactataagctagtgcccagaaaaggagttaaggcaaacgaggtcctccagaacttcctgcagtcacaggtggttgtagaggaatccatcctgcagtcagacaaagccctcactgctggagagaaggccatagcagcggagcgggccatgaaggaagcagctgagaaggaacaggagctgctaagagaaaaacagaaggagcagcagcaaatgatggaggctcaagagagaagcttccaggaatacatggcccaaatggagaagaagttggaggaggaaagggaaaaccttctcagagagcatgaaaggctgctaaaacacaagctgaaggtacaagaagaaatgcttaaggaagaatttcaaaagaaatctgagcagttaaataaagagattaatcaactgaaagaaaaaattgaaagcactaaaaatgaacagttaaggctcttaaagatccttgacatggctagcaacataatgattgtcactctacctggggcttccaagctacttggagtagggacaaaatatcttggctcacgtatttaagagcctgaatattccaggtaagaaaatataaaatgaggtttattttattttaataacataacactgttgctcattttgtaagtatatgtgttatagcagtttcattcaagaaaagtttaaaattaaaaagtgattatcaaagaatatcagggcctgacatccacaaaaaacaaacttaattttgattgaactaataatttataaacatgggaaacaagtcagaagtagtgacattattcctagaaaagatttaaggaaagcaaaaagacaactggtaagattaagaagccattaaccatttgcaatttatattatagtcacagaaataatttcagttatgactagctcttgccgattaatgagaagagagcagctccacaatttttaatttttttaacttttattttagattcaggggtatatgtgcaggtttgttacataggtaaactgcatgtcatgggggtttggtgtgcagataattttatcacacaattattaatcataatacccaataggtttttttctgatcttctccctcctcccaacctacaccctcaagtagaccccagtgtctcttgttctcctctgagtatccatgtgttctctttgtttggcccccatttataagtgagaacatgtggtatttgggtttctgttcctgtgttagtttgcttatgataatggcttccagctccatccatattgctacagaggacatgatcttgttgttttttatggctgcatagtattccatggtgtttgtatataccacattttcattatccagcctattattaatgcacatttaggttgattccttatctttgctattgtgaacagtgctgcaatggacatacacgtgcatgtgcctttatggtacaatgatttatatttccttgggatatgcattcctttgggaataatgggattgctgagttgaatggtaattctgagttctttgaggaatcaccaacctgctttccacagtggctaaactaatttacactcccaccaacagtgtatgtgttccattttctccacaaccttgccagcatctgttatttattgactttctagtaacagccattctgactggtgtgagatggtatgcatttctgtagtgattagtgatgatgagtgatttttatatgctttttaaatgcatatatgtcttcttttgaaatgtgttcatgttctttgcccactttctttttaatggggttgcttgtttttcgcttgtaaattttttgaagcttcttatagattctggatattagatctttgttggatgcatagttggcaaatattttctaccattctgtaggttgtctgttactttgttaattgtttcattttgttttgtttttgttttttgaaacagggtctcactttgacacccaggctggagtgcagtagcacaaacatgggtcattgtagcctcaacctcccaggctcaagcagtcctttcacctcaaccccccacatagctgggactacaggtgcttacacccaagaccagttaattttttgtatttgtttgtagagatgtgtttttccatgttgcccaagctggtcttgaactactgagctcaagcaatctgcctgcttcagcctcccaaagtactgggatttaggcatgagccaccacatctggccaatagtttcttttgatgtgcagaagctctttaatttaattagatctcctttgtcagtttttgtttttgctgcaattgcttatgttatcttcatcatgaaattttagccaagtcttatgtccagaatggtatttcttaggttatttttcagagtttttatagtttaatgttttatatttaagtctttaatccttcttaagttgatttttgtatgcagagtaagctgggggcccagtttcaatcttctgcatatggctagccagtaatcccagcaccatttattaaatggggacttctttccccattgcttgtttttgtcagctttgtccaagatcagatgattgtaggtgtacagcattatttctggactctctgttatgttccatttatctgtgtgtctgtttttctactaataccatgctgttttggttactgtagctctgtagtatggtttgaggtttggtaacttgatgcctccccttttgttctttatgtttaggattgccttggctaggctcttttttggttccatatgaattttaaagtagtttctaattctgtgaagaatgtcattggtagtttgatagggatagcattgaactatttgctcaactcaacattttaggaatttatttctgctgtctagtgctcaaaacttgcagctagaattgagggaagagagagaccttcttatattgttttatattgtttgatactcagtacctgttttaagaaaaaacaacaaggaagtaaaaccaaagacaggcagcccagcgccaggcccaaaaccaggcctgggcctgcctggcctaaacccagtagttaaaaatcaactcattgcctgtaatcccagcactttgggaggccgagacgggtggatcacgaggtcaggagatcgagaccatcctggctaacacggtgaaaccccgtctctactaaaaatacaaaaattagccgggcatggtggcacgcgcctgtagtcccagctacacgggaggctgaggcaggagaatggcgtgaacccaggaggcggagcttgcagtgagtcgagatcgcgccactgcactccagcctgggcgacagagcgaaactccgtctcaaaaaaaaaaaaaaaaaatcaactcataacttagaaaccgatgttattcatagattccagacattgtatagaagaacatttggaaactcactgccttgttctgtttctctctgaccaccagtgcatgcagcccctgtcatgtaccgcctgtttgctcaaatcaatcatgaccctttcatgtgaaatctttagtgttgtgagcccttaaaagggacagaaattgtgcattcaaggagcttggattttaaggcagcagcttgctgatgccaccagctgaaaaaagcccttccttctccaactcggtgtctgagaagttttgtctgcagctcatcctgctacagaatgaactccttgtaattctacaagatatgccatgggccttttcacaggggacacaggcttcttaaaacaacccggcttcctcaccctatgtcctttatttacaaagctgtgctcctattcatgagcatggaatgtttttccatttgtttgtgacatctcttatttctttcaggggtatcttgtaattctcattatatatatcttttgcttccttggttagctgtatttttaggtattttagtcttcttgtggcaattgtgaatgggattgcattcctgatttggctcttggcttaatgttattaacgccacattttttaaatagacaaaaatatgagattaaaaatgttgaattttactaacaataaaagttgttcaaaggaaaactataaggttcttgtttcaactctgtcataggaagaacaggacagtgagctggcacagagttagggaaactgactgtgtctcatattggctagtgagagtgatctgttggaattgtatatcaaaattttaatgtacatacattttgtctagcaattctactattgggtatttatatagtacatataaatataaatgtatatgtttagtaaatatatacttatagttagtaaatatattttatatctatttagtaaatatactaaatgtcaggcctctgagcccaagctaagccatcatatcccctgtgacctgcatgtacatacgtccagatggcctgaagcaagtgaagaatcacaaaagaagtgaaaatggcctgttcctgccttaactgatgacattaccttgtgaaattccttctcctggctcatcctggctcaaaagctcccccactaagcaacttgtgacacccacctctgcccgccagagaacaaccccctttgactgtaattttcctttaccaacccaaatcctgtaaaatggtcccaaccctatctcccttcactgactgtcttttcggactcagccagcctgcacccaggtgattaaaaagctttattgctcacacaaa

SEQ ID NO: 336 - DNA, 3437 bp, Homo sapiens
agcccgcccggaacgcccgcgggctaggccacaacggctcgggaaccgccgccggtatccgcgtccgcagcgccgccagccaggcgagagccgtgtgggatcccagcgcccgcactcccgcccccgccaaggagccaggaatggcacaactagagaggagcgccatctctggcttcagctctaagtccaggcgaaactcattcgcatatgatgttaagcgtgaagtatacaatgaggagacctttcaacaggaacacaaaaggaaggcctcctcttctgggaacatgaacatcaacatcaccaccttcagacaccacgtccagtgccgctgctcatggcacaggttcctacgatgcgtgcttacaatctttcccttcctagaatggatgtgtatgtatcgattaaaggattggcttctgggagacttacttgctggtataagtgttggccttgtgcaagttccccaaggcctgacacttagtttgctggcaaggcaactgattcctcctctcaacatcgcttatgcagctttctgttcttcggtaatctatgtaatttttggatcgtgtcatcaaatgtccattggttccttcttcctggtgagtgctctgctgatcaacgttctgaaagtgagcccattcaacaacggtcaactggtcatgggatctttcgtcaagaatgagttttcggccccctcctaccttatgggctataataaatccttgagtgtggtggcaaccacaacttttctgactgggattattcagctaataatgggcgtattgggtttgggcttcattgccacttaccttccggagtctgcaatgagtgcttacctggctgctgtggcacttcatatcatgctgtcccagctgactttcatctttgggattatgattagtttccatgccggtcccatctccttcttctatgacataattaattactgtgtagctctcccaaaagcgaattccaccagcattctagtatttctaactgttgttgttgctctgcgaatcaacaaatgtatcagaatttctttcaatcagtatcccattgagtttcccatggaattatttctgattattggcttcactgtgattgcaaacaagataagcatggccacagaaaccagccagacgcttattgacatgattccttatagctttctgcttcctgtaacaccagatttcagccttcttcccaagataattttacaagccttctccttatctttggtgagctcctttctgctcatatttctgggcaagaagattgccagtcttcacaattacagtgtcaattccaaccaggatttaatagccatcggcctttgcaatgtcgtcagttcatttttcagatcttgtgtgtttactggtgctattgctaggactattatccaggataaatctggaggaagacaacagtttgcatctctggtaggcgcaggtgtgatgctgctcctgatggtgaagatgggacactttttctacacactgccaaatgctgtgctggctggtattattctgagcaacgtcattccctaccttgaaaccatttctaacctacccagcctgtggaggcaggaccaatatgactgtgctctttggatgatgacattctcatcttcaattttcctgggactggacattggactaattatctcagtagtttctgctttcttcatcaccactgttcgttcacacagagctaagattcttctcctgggtcaaatccctaacaccaacatttatagaagcatcaatgattatcgggagatcatcaccattcctggggtgaaaatcttccagtgctgcagctcaattacatttgtaaatgtttactacctaaagcataagctgttaaaagaggttgatatggtaaaggtgcctcttaaagaagaagaaattttcagcttgtttaattcaagtgacaccaatctacaaggaggaaagatttgcaggtgtttctgcaactgtgatgatctggagccgctgcccaggattctttacacagagcgatttgaaaataaactggatcccgaagcatcctccattaacctgattcactgctcacattttgagagcatgaacacaagccaaactgcatccgaagaccaagtgccatacacagtatcgtccgtgtctcagaaaaatcaagggcaacagtatgaggaggtggaggaagtttggcttcctaataactcatcaagaaacagctcaccaggactgcctgatgtggcggaaagccaggggaggagatcactcatcccttactcagatgcgtctctactgcccagtgtccacaccatcatcctggatttctccatggtacactacgtggattcacgggggttagtcgtattaagacagatatgcaatgcctttcaaaacgccaacattttgatactcattgcagggtgtcactcttccatagtcagggcatttgagaggaatgatttctttgacgctggcatcaccaagacccagctgttcctcagcgttcacgacgccgtgctgtttgccttgtcaaggaaggtcataggctcctctgagttaagcatcgatgaatccgagacagtgatacgggaaacctactcagaaacagacaagaatgacaattcaagatataaaatgagcagcagttttctaggaagccaaaaaaatgtaagtccaggcttcatcaagatccaacagcctgtagaagaggagtcggagttggatttggagctggaatcagaacaagaggctgggctgggtctggacctagacctggatcgggagctggagcctgaaatggagcccaaggctgagaccgagaccaagacccagaccgagatggagccccagcctgagactgagcctgagatggagcccaaccccaaatctaggccaagagctcacacttttcctcagcagcgttactggcctatgtatcatccgtctatggcttccacccagtctcagactcagactcggacatggtcagtggagaggagacgccatcctatggattcatactcaccagagggcaacagcaatgaagatgtctaggagatgaactagaaataaggggtcagataatgctggcaaatcctcctacccaaaaaggggtcaattgtccagagacctagactggatacgaactagcagtacttccttcctgactgtgactcctactacctgccagccttcttccttgctctgcgctgggatcatactcccaaatcacattactaaatgccaacaattatctctgaattccctatccaggctcccctcatttcaccttcagcatatattctagtcatgaatttccttcttcacacaccccacatctctgggctttgtgccagaccatctctaacttaatcctctcatccctgttcccctttctccaaagagatgaagctcaaataaaatgtataactctagtaa

SEQ ID NO: 337 - DNA, 1070 bp, Homo sapiens
gcgacgctggttcccaggggagagccagccgctgccgcggcactggttcagacggccaggccctagggacccaccatggatcctgaacacgccaaacctgagtcatccgaggcaccttcagggaacttgaaacaaccggagactgccgcagccctggcaagtagcggcagcgtagtgagttctgtacccaaggcacagcgcaacatctcagcgaagaccgcaccccggaagcaccccgcagtctcaattcgcagtgcgcagtccgcagccgccgcacgtccccaaggcagtgagggcaccgcaccctcaaggaaagccaccacacgcccacccccaaagcccacactcccaccccccacgccctctgcacacactgaatccaaactcttaaatgagatggcgatcaaagagcgcgtggagggccgagccaaagtcccgtacaaattcagggacagcctcaaacgtttctccttctcgcccactggaatgttgaagatcctgagactgagtcttatcttaggagcattagcttgtttcatcatcacccaagccaatgagtcatttataacaatcacaagtctggaaatctgcattgtcgttttttttattctaatatatgtgctaacccttcaccacttgctgacctatttacattggcccttacttgatcttaccaacagtatcattacagctgtgttcctttcagtagttgccatcttggccatgcaagaaaagaaaagaaggcatttactctatgtcggggggtccctgtgtctcacagcggtaatcgtgtgttgcatcgatgcgtttgtggtcaccacgaagatgaggaccaacttgaaaagattcctgggagtcgaagttgaaaggaagctttcccccgccaaggacgcctaccccgaaaccggccccgacgccccgcagaggcccgcctgaagccagcccggcgccctagcagatgcacgtgtctgtcgaatcgctgcctccgagcccacccccgagctcgcatgctgtcacccattccagcctaaatgtgaccataaaattagggctgctgcttttatcgagaa

SEQ ID NO: 338 - DNA, 1973 bp, Homo sapiens
gcctcatctcccggaatgtatcaaaggaaacccctgtctttgaaaaagacttcttttgagctaactttcttatactggtacctttctaatctcactacaatatgtaacattggtgttcgatctcaagtatttctgaatatattcccctatccacagaaatatactctgggggaaaaaaaatagaacaaattcttgccgtcctgaccattgaacaagagactaattagacaatggggctagaaaaacctcaaagtaaactggaaggaggcatgcatccccagctgataccttcggttattgctgtagttttcatcttacttctcagtgtctgttttattgcaagttgtttggtgactcatcacaacttttcacgctgtaagagaggcacaggagtgcacaagttagagcaccatgcaaagctcaaatgcatcaaagagaaatcagaactgaaaagtgctgaagggagcacctggaactgttgtcctattgactggagagccttccagtccaactgctattttcctcttactgacaacaagacgtgggctgagagtgaaaggaactgttcagggatgggggcccatctgatgaccatcagcacggaagctgagcagaactttattattcagtttctggatagacggctttcctatttccttggacttagagatgagaatgccaaaggtcagtggcgttgggtggaccagacgccatttaacccacgcagagtattctggcataagaatgaacccgacaactctcagggagaaaactgtgttgttcttgtttataaccaagataaatgggcctggaatgatgttccttgtaactttgaagcaagtaggatttgtaaaatacctggaacaacattgaactagaaactcagaaagtggtccttgtgatggaaagagaaaagaaaaaccaattagaataaggcagaatgtacgtgcgtcattggaacacagaaaacatgctggttcatacagcgtttttagtcataatggtcttttttattttgtttgattcattcgagacaacatgtgtgtatgtgtgtgtgtgtgtgtgtagataatgtggtttttgtatggtgtttgatggaaggaataatctttctttgctttcttagtagtatttcaaggtgtttacttttcaattggtgtgcactgaatgcatgtatggaagaatagcgtgaataatgcaatctctttgtcatttttccccttctcagactcttagctcttaaaattcaaagatgggatattctaactggtagtggtgcatcatttttaacccaaatattgcaagcactttaaagatttgaaaccacatttttattgtttgatgtttcattttcagactttttaatgtcagtcattacaattacattgcatgaggaaaatttttccagaacaacagtgtggaatagttctgaattatgctgttctacagatagaaaaaaagtccaaatgcctttaaaaatttacttcttactccacccaacacgtttttgcaaagcaagaagtctttgtaagacaccttaaacaaagtccttcaattctacagcagaggaaataaaatcccccagaagccaaagggctcaccttcacattgttagttcatgacagacccaggtgtgcttcattagagataacatacattccctttggtatcacaggaagttactggggattactcgacctcattacttagctaacgactggataaaatttcttaattgtttgaagtaacattgtattcgtgtttgcattattaatttgaatagaaaataatcacattttcaacccatttatacaaattgttaatgtttctttagagctgtataactatagtttgaactagcaaggaagttattgttttgacaaccagaaattatgcttttctggtgcatgaaacattaattgcaaagggcagtcacatccaactttaataaaatatggtggtctttcttaaaa

SEQ ID NO: 339 - DNA, 2290 bp, Homo sapiens
gaaaggagcaagccaggaagccagacaacaacagcatcaaaacaaggctgtttctgtgtgtgaggaactttgcctgggagataaaattagacctagagctttctgacagggagtctgaagcgtgggacatggaccgttcactgggatggcaagggaattctgtccctgaggacaggactgaagctgggatcaagcgtttcctggaggacaccacggatgatggagaactgagcaagttcgtgaaggatttctcaggaaatgcgagctgccacccaccagaggctaagacctgggcatccaggccccaagtcccggagccaaggccccaggccccggacctctatgatgatgacctggagttcagacccccctcgcggccccagtcctctgacaaccagcagtacttctgtgccccagcccctctcagcccatctgccaggccccgcagcccatggggcaagcttgatccctatgattcctctgaggtagagcctccagccctgcctttgcctttcagtgggctgctgcaggaagaccgggggcagggagcagagtgtgtgtgtgtgtgtgtgtgtgtgtgtgtgtgtgtgtgtttgtgtgtgtgtgtatctgggacctatttcagtcctgtgtcagccctagctccaagatatctgcccccaagggcactggaaatttgcagtttcagcaagggcaggaggcccagctggtggcctcagatgggaactcacagaagtctggcactgcttttttaaggctggggcaaaggcctgaaagggagagaagattggcgctgggtgccggggcccctttggctcctcaccgtgatgcattctgccttcctgtctactaggatgacaaggagtatgtgggctttgcaaccctccccaaccaagtccaccgaaagtccgtgaagaaaggctttgactttaccctcatggtggcaggagagtctggcctgggcaaatccacacttgtcaatagcctcttcctcactgatctgtaccgggaccggaaacttcttggtgctgaagagaggatcatgcaaactgtggagatcactaagcatgcagtggacatagaagagaagggtgtgaggctgcggctcaccattgtggacacaccaggttttggggatgcagtcaacaacacagagtgctggaagcctgtggcagaatacattgatcagcagtttgagcagtatttccgagacgagagtggcctgaaccgaaagaacatccaagacaacagggtgcactgctgcctgtacttcatctcacccttcggccatgggctccggccattggatgttgaattcatgaaggccctgcatcagcgggtcaacatcgtgcctatcctggctaaggcagacacactgacacctcccgaagtggaccacaagaaacgcaaaatccgggaggagattgagcattttggaatcaagatctatcaattcccagactgtgactctgatgaggatgaggacttcaaattgcaggaccaagccctaaaggaaagcatcccatttgcagtaattggcagcaacactgtagtagaggccagagggcggcgagttcggggtcgactctacccctggggcatcgtggaagtggaaaacccagggcactgcgactttgtgaagctgaggacaatgctggtacgtacccacatgcaggacctgaaggatgtgacacgggagacacattatgagaactaccgggcacagtgcatccagagcatgacccgcctggtggtgaaggaacggaatcgcaagtatgaccagaagccaggacaaagctggcagggggagatcccaagcctagccttgggtgagaccaagccctacttttgttcttctataggccctgggctcaatctaagcgggtgctggggtcctcctcgccttatcaacccttttctccctttagcaaactgactcgggaaagtggtaccgacttccccatccctgctgtcccaccagggacagatccagaaactgagaagcttatccgagagaaagatgaggagctgcggcggatgcaggagatgctacacaaaatacaaaaacagatgaaggagaactattaactggctttcagccctggatatttaaatctcctcctcttcttcctgtccatgccggcccctcccagcaccagctctgctcaggccccttcagctactgccacttcgccttacatccctgctgactgcccagagactcagaggaaataaagtttaataaatctgtaggtggctaaaaaaaaaaaaaaaaaaaaaaaaaaaaaaa

SEQ ID NO: 340 - DNA, 3407 bp, Homo sapiens
gctctgctccaggcatctgccacaatgtgggtgcttacacctgctgcttttgctgggaagctcttgagtgtgttcaggcaacctctgagctctctgtggaggagcctggtcccgctgttctgctggctgagggcaaccttctggctgctagctaccaagaggagaaagcagcagctggtcctgagagggccagatgagaccaaagaggaggaagaggaccctcctctgcccaccaccccaaccagcgtcaactatcacttcactcgccagtgcaactacaaatgcggcttctgtttccacacagccaaaacatcctttgtgctgccccttgaggaagcaaagagaggattgcttttgcttaaggaagctggtatggagaagatcaacttttcaggtggagagccatttcttcaagaccggggagaatacctgggcaagttggtgaggttctgcaaagtagagttgcggctgcccagcgtgagcatcgtgagcaatggaagcctgatccgggagaggtggttccagaattatggtgagtatttggacattctcgctatctcctgtgacagctttgacgaggaagtcaatgtccttattggccgtggccaaggaaagaagaaccatgtggaaaaccttcaaaagctgaggaggtggtgtagggattatagagtcgctttcaagataaattctgtcattaatcgtttcaacgtggaagaggacatgacggaacagatcaaagcactaaaccctgtccgctggaaagtgttccagtgcctcttaattgagggtgagaattgtggagaagatgctctaagagaagcagaaagatttgttattggtgatgaagaatttgaaagattcttggagcgccacaaagaagtgtcctgcttggtgcctgaatctaaccagaagatgaaagactcctaccttattctggatgaatatatgcgctttctgaactgtagaaagggacggaaggacccttccaagtccatcctggatgttggtgtagaagaagctataaaattcagtggatttgatgaaaagatgtttctgaagcgaggaggaaaatacatatggagtaaggctgatctgaagctggattggtagagcggaaagtggaacgagacttcaacacaccagtgggaaaactcctagagtaactgccattgtctgcaatactatcccgttggtatttcccagtggctgaaaacctgattttctgctgcacgtggcatctgattacctgtggtcactgaacacacgaataacttggatagcaaatcctgagacaatggaaaaccattaactttacttcattggcttataaccttgttgttattgaaacagcacttctgtttttgagtttgttttagctaaaaagaaggaatacacacaggaataatgaccccaaaaatgcttagataaggcccctatacacaggacctgacatttagctcaatgatgcgtttgtaagaaataagctctagtgatatctgtgggggcaaaatttaatttggatttgattttttaaaacaatgtttactgcgatttctatatttccattttgaaactatttcttgttccaggtttgttcatttgacagagtcagtattttttgccaaatatccagataaccagttttcacatctgagacattacaaagtatctgcctcaattatttctgctggttataatgcttttttttttttgcctttatgccattgcagtcttgtactttttactgtgatgtacagaaatagtcaacagatgtttccaagaacatatgatatgataatcctaccaattttcaagaagtctctagaaagagataacacatggaaagacggtgtggtgcagcccagcccacggtggctgttccatgaatgctggctacctatgtgtgtggtacctgttgtgtccctttctcttcaaagatcctgagcaaaacaaagatacgctttccatttgatgatggagttgacatggaggcagtgcttgcattgctttgttcgcctatcatctggccacatgaggctgtcaagcaaaagaataggagtgtagttgagtagctggttggccctacatctctgagaagtgacggcacactgggttggcataagatatcctaaaatcacgctggaaccttgggcaaggaagaatgtgagcaagagtagagagagtgcctggatttcatgtcagtgaagccaagtcaccatatcatatttttgaatgaactctgagtcagttgaaatagggtaccatctaggtcagtttaagaagagtcagctcagagaaagcaagcataagggaaaatgtcacgtaaactagatcagggaacaaaatcctctccttgtggaaatatcccatgcagtttgttgatacaacttagtatcttattgcctaaaaaaaaatttcttatcattgtttcaaaaaagcaaaatcatggaaaatttttgttgtccaggcaaataaaaggtcattttaatttagctgcaatttcagtgttcctcactaggtggcatttaaatgtcgcctgatgtcattaagcaccatccaaaaagtctgcttcataatctattttcaagacttggtgattctgaaagttttggtttttgtgactttgtttctcaggaaaaaaaatattcctacttaaattttaagtctataattcaatttaaatatgtgtgtgtctcatccaggataggataggttgtcttctattttccattttacctatttactttttttgtaagaaaagagaaaaatgaattctaaagatgttccccatgggttttgattgtgtctaagctatgatgaccttcatataatcagcataaacataaaacaaattttttacttaacatgagtgcactttactaatcctcatggcacagtggctcacgcctgtaatcccagcacttgggaggacaatgtgggtggatcacgaggtcaggagttcgagaacagcctggccaacatggtgaaaccccgtctccactaaaaatacaaaaattagccaggcatggtggcgtacacttgtaattccagctactcaagaggctgaggcaggaggattgcttgaaccctgaaggcagaggttacagagccaagatagcgccactgcactccagcctggatgacagagcaagactccgtctcaaaaaaaaaaaaaaaaaaaagcaagagagttcaactaagaaaggtcacatatgtgaaagcccaaggacactgtttgatatacagcaggtattcaatcagtgttatttgaaaccaaatctgaatttgaagtttgaatcttctgagttggaatgaatttttttctagctgagggaaactgtatttttctttccccaaagaggaatgtaatgtaaagtgaaataaaactataagctatgttaaataca

SEQ ID NO: 341 - DNA, 1202 bp, Homo sapiens
ccccagccctcagagcaacctcagcccagcccagcccagctccagctccagctccagcccgggccccatcatggccaaggactttcaagatatccagcagctgagctcggaggaaaatgaccatcctttccatcaagggccacctcctgcccagcccctggcacagcgtctctgctccatggtctgcttcagtctgcttgccctgagcttcaacatcctgctgctggtggtcatctgtgtgactgggtcccaaagtgagggtcacaggggtgcacagctgcaagccgagctgcggagcctgaaggaagctttcagcaacttctcctcgagcaccctgacggaggtccaggcaatcagcacccacggaggcagcgtgggtgacaagatcacatccctaggagccaagctggagaaacagcagcaggacctgaaagcagatcacgatgccctgctcttccatctgaagcacttccccgtggacctgcgcttcgtggcctgccagatggagctcctccacagcaacggctcccaaaggacctgctgccccgtcaactgggtggagcaccaaggcagctgctactggttctctcactccgggaaggcctgggctgaggcggagaagtactgccagctggagaacgcacacctggtggtcatcaactcctgggaggagcagaaattcattgtacaacacacgaaccccttcaatacctggataggtctcacggacagtgatggctcttggaaatgggtggatggcacagactataggcacaactacaagaactgggctgtcactcagccagataattggcacgggcacgagctgggtggaagtgaagactgtgttgaagtccagccggatggccgctggaacgatgacttctgcctgcaggtgtaccgctgggtgtgtgagaaaaggcggaatgccaccggcgaggtggcctgaccccagcacacctctggctaacccataccccacacctgcccagctctggcttctctgttgaggattttgaggaaaggaagaaacactgagacaggggtatggggaagagctgagcaaagagagaaaggaggtagtttaagagtccctgaccctggaggactgagatcccacctccttctgtaattcattgtaattattataatcgtcagcctcttcaatggcgtaggaaagaagaaacaaatgcttgaatctc

SEQ ID NO: 342 - DNA, 5768 bp, Homo sapiens
gaaactttgcgcccagtccgcagggcgggccgcgcctttaccgcccagctgcctcccggagcccccgcgccctcccgacgcgcagagccatggcctcccacctgcgcccgccgtccccgctcctcgtgcgggtgtacaagtccggcccccgagtacgaaggaagctggagagctacttccagagctctaagtcctcgggcggcggggagtgcacggtcagcacccaggaacacgaagccccgggcaccttccgggtggagttcagtgaaagggcagctaaggagagagtgttgaaaaaaggagagcaccaaatacttgttgacgaaaaacctgtgcccattttcctggtacccactgaaaattcaataaagaagaacacgagacctcaaatttcttcactgacacaatcacaagcagaaacaccgtctggtgatatgcatcaacatgaaggacatattcctaatgctgtggattcctgtctccaaaagatctttcttactgtaacagctgacctgaactgtaacctgttctccaaagagcagagggcatacataaccacactgtgccctagtatcagaaaaatggaaggtcacgatggaattgagaaggtgtgtggtgacttccaagacattgaaagaatacatcaatttttgagtgagcagttcctggaaagtgagcagaaacaacaattttccccttcaatgacagagaggaagccactcagtcagcaggagagggacagctgcatttctccttctgaaccagaaaccaaggcagaacaaaaaagcaactattttgaagttcccttgccttactttgaatactttaaatatatctgtcctgataaaatcaactcaatagagaaaagatttggtgtaaacattgaaatccaggagagttctccaaatatggtctgtttagatttcacctcaagtcgatcaggtgacctggaagcagctcgtgagtcttttgctagtgaatttcagaagaacacagaacctctgaagcaagaatgtgtctctttagcagacagtaagcaggcaaataaattcaaacaggaattgaatcaccagtttacaaagctccttataaaggagaaaggaggcgaattaactctccttgggacccaagatgacatttcagctgccaaacaaaaaatctctgaagcttttgtcaagatacctgtgaaactatttgctgccaattacatgatgaatgtaattgaggttgatagtgcccactataaacttttagaaactgaattactacaggagatatcagagatcgaaaaaaggtatgacatttgcagcaaggtttctgagaaaggtcagaaaacctgcattctgtttgaatccaaggacaggcaggtagatctatctgtgcatgcttatgcaagtttcatcgatgcctttcaacatgcctcatgtcagttgatgagagaagttcttttactgaagtctttgggcaaggagagaaagcacttacatcagaccaagtttgctgatgactttagaaaaagacatccaaatgtacactttgtgctaaatcaagagtcaatgactttgactggtttgccaaatcaccttgcaaaggcgaagcagtatgttctaaaaggaggaggaatgtcttcattggctggaaagaaattgaaagagggtcatgaaacaccgatggacattgatagcgatgattccaaagcagcttctccgccactcaagggctctgtgagttctgaggcctcagaactggacaagaaggaaaagggcatctgtgtcatctgtatggacaccattagtaacaaaaaagtgctaccaaagtgcaagcatgaattctgcgccccttgtatcaacaaagccatgtcatataagccaatctgtcccacatgccagacttcctatggtattcagaaaggaaatcagccagagggaagcatggttttcactgtttcaagagactcacttccaggttatgagtcctttggcaccattgtgattacttattctatgaaagcaggcatacaaacagaagaacacccaaacccaggaaagagataccctggaatacagcgaactgcatacttgcctgataataaggaaggaaggaaggttttgaaactgctttatagggcctttgaccaaaagctgatttttacagtggggtactctcgcgtattaggagtctcagatgtcatcacttggaatgatattcaccacaaaacatcccggtttggaggaccagaaatgtatggctatcctgatccttcttacctgaaacgtgtcaaagaggagctgaaagccaaaggaattgagtaagacaactgctggaagatgtcttaaatcaagctttcaaaaaaatatattttaggaggctgatttaatgccagtctaaatccttatgtagaaaggactttgaaatttttcttctcaagaaatggtttgtataagaataacaatctgctagtctgtcatttctggagtgatacttttttttttgagacggagtctgctctgtcgctcgcgctggagtgcagtggcatgatctcggctcactgcaagctccgcctcccaggttcatgccattctcctacctcagcctcccgagtagctgggactacaggcgcccaccaccatgcccggctaatttttgtttttgtatttttagtagagacagggtttcactgtgttagccaggatggtctcgatctcctgacctcgtgatccgcccgcctcagccttccaaagtgttgggattataggcgtgagccaccgcgcccagccctggagtgatactttttatggaagacaaaagccccccaaatctgtgtaaaatctgctgcaaaggtgtcatccctcttgtgtcatcactggggttagaggtgggtccgaaataatcttctgtgtccttcagttggactctcggctgccaattgatctctttttcattgccatctctggggtggttctttggttttttgtgtgttttccccttcatctctacctgtgaaagtgaaattctattgtaaatgggaggaaaaagggttggttgtgaaaaattaaagacccacattctgctttcttactcatggtaagaaaagtggccatgagtagagattgggcaagcattggtaataaatggaataagactattattattattatttgagatggagtctcactctgtcacccaggctggaatgcagtggtgtgatcttggctcactgcaacctccacttcccgggttcaagcgattctcctgcctcagcctcctgagtagctgggattacaggtgtgtgcctccacacccggctaattttttgtatttttagtagagacggggttttgccatgttggccaggctggtttcaaactcctgagctcaaatgatcctcctgccttggcctcccaaagtgctggaattacaggcatgagccaccacacccacacaagactatcatttttaatgaccaagagcctagtatatagttggtgcctgtcttagtctgtttgtgttgctataaaagaacacctgagactgggtaattgataaagaaaaaggtttgtttggctcacaattttgctggctagaaggttgggcatccggtgaaagcctcaggctgcttccattcatagcaaagggcagccagtgtgtgcagaaatcaaatgacagagaggaagtgagagagagaggtgtcggggaggtgccaggctctttttaacaagcagttcttcaggaactaagagtgagtcactcccatgagaacagcaccaagccattcatgggggaatctgcccccatgacccagacccctcccgttaggcttcacctccaacactgaggatcaaatttcaacatgagatttggaggaggtcaaacaaactaaactgtagcagtgtttcataaaattgtttgcctgactcaggttgctagtaagccagcagagggatatttgcctcctaaatctttggcagaggcaggagtaaggaagccatttctggagtccttgctactaatttggaaaactgagcttctttctttcattgctttttcccttaagagacaagtccttactatattgccctgtctctcaagggaagacatcaagactggacttgaactcctgggctcaagccatcccccaaccttggcctctcgagtagatgggattataggcatgtgccacggtgcctgacttgagtttcttattctagaacacttggagcctgaactctgaccaggcccctcacttgagcctttgctttctgctccttgtaaactgccatattgggtgcacttgccctgccacagtaatgctatatatttctgagcattgtttttctctagataattttatatttttgagtataccccacttccaagtgttttttgttttgttttgctttgtttttgttgttgttgttttgagacagggtctcactgtgtcccccaggctggagtgcagtggcacaatgacgactcactgcagcctcaacctcctggggccaagtgatcctcccacctcagcctctcaagtggctgggaccacagaagtgcaccaccatgcctggcttttttttttttttttggtcgagatggggtgtccctgtgttgcccagactggtcttgaactcctggactcaagggatcctcctgtcttgggctcccaaagtgttgggattacaggcgtgagtgaccatgcctagctcacttccaggtttaacagacaaaataaacttactctagtttccatctctatcattttataataaccgtagcccacattgtagtagtttttcagctctttactaagtcccaccaattcatgttttcacccttaaaatctttctcactgatactctctctggacagaaaaaaggtgaaataagcctactataaggaatatatgacatgctaaattttatttttaaacggttcttcaagtcagattaaagtaataatagcaaattatgtgattatccatgtcccagcctctctccaaaaaaatagtaaacaagatgtcttcttcttttcccaaagatacacatacacacatgtacaaatttttttatcagataataatagctaatatttaatgagtacttaccttagtttgtcccctttacaacagctttacatctgtgtgattgatacagttcatattcccattttataactgagaaaactggtgcacagagaggataagcaacttgccaaaggtcacacagttaataagtggaaatgctggggtatgaaccaggtagtctgcccccatagctctgccccccagagctgtactgtctcccatgagggtacttctccatggagcagcctgaggcgatccctttattctgggcttctctcagaaatggattcccacacagtattcaaagcaaatttccccagaggaaatcctattggaagaacttaaaaactcagaatctttttctttgtccagagagttgaggaagcttaagctaaatgatacatgtttttaaaaaaaaatcagattataaatttagtttttggtgattcattaaattctttactattatagttattttctagctgttcatcttttagctaaatttgttccaaagaagcaaaagtttggtttctactaagttctggattctggatgggagattgcactgtgtgtgacatgcaagtttcatggtgtgggagattgcagagcatttgggttactgcttttactctttggaagctgttatcatctgtatctgctttaaataaagttaaagatttggaacaaa

SEQ ID NO: 343 - DNA, 6980 bp, Homo sapiens
agcccggaaggagccggccggcctgagtgcccgcggcggctgagtcaggcggcgagcgcggcccgttaccgccggcgccgggggccggggtggcgctgtggtttcggtgcgggccgcgggcgggagggaggcggcctaacgagctctcggcacgcaccctcccccgccctgctcctgtcctgtcccgcgagggccccggcgcccagctctggcgtcggccccgagagccctggtctcaccgtgggagccgggcgcgggtcccgccggcatctgcgcggcgtctgggggtgaccgcagcccctcggggtcggcagcgggccccgcgctcccggtggctgcggcctgagggtccctcttccctgcgcaggggcccgcgcgcctcaccatggggcccctgagccgggacgcctgggcccagcgcttgggggccttccgggccagcccgtctgccttcatggcaggtcccgagggggaggatttgggtcgcgacctgctgagcgacctgagaagtgagaagctgagcgaacagaccaaggtttccctgctggccctgagcatggagtaccctgcgcagctgtggcccgacgcctctgcggccgaagtggccgccacctccctgttggacaccttggtcctcctacccccgcggccctcagctctccgtcggccactgctgctggcggccaccactgccctggcggcgggcggcgcgctgggccccacctcgggcgcctcctgccggctcctgcccctactgctcggcctggccgcgggtagcgatctggggcgaggctttgtccccgcctcggaacagcgccccttgcaggccacggcctgcgagtgcctgcgagagctagagagctgcaagcccgggctgctggggggctccctggggttgctgcggggcctgctggggcaggaaggccctgtccagccactcagcctgttgctggccctcgctttgcgcaacaccttggtgctccagtcccgggttggggctggcctggggggactgctcacggataaggtctccccaactgggggtggtccctgggattggacactagtggaggagggcgatggacgccttcagccccaggcacccagctggccggcagctgaggagggagagggggagcgtagccttacagcacgagagcacagccctgaggaggcgcgggagctgcgggctgcggtgatccagcttctggacacctcctatctgctcactcctgtggcccaggcccagctcctgtggctgctgggctgggccctgcggggtctgcagggacagccaccggcactcttcaagccgcagctggtacggctgctaggcacagcacagctgacactgttgcacgccatgcttgcgctcaaggcggcctttggtgaggccttgttcacagcccaggatgaagcgttgctgctccgccggctcaccttggctgcccagcaccctgctctgcctccgcccacccatctcttttaccttcactgcgtcctgagcttccctgagaactggccgctgggccctgaaggtgaggaggctgccccactgctgctagggccccagctatgccgtggtctcctgcccagtctcctgcatgacccaatggccctcctggcccgcctgcatttactgtgcctgctctgtgccgaggaggaagaagaggagaaaggccagcttccaagcccacggcactacctggaagagctgctggctggcttgcggcagcgggcagccctggatgggggcccccgggccttggccactctctgcttccaggcctcgtatctggtggcctgctgcctggctgggcaacctacggtgctgacccccttgatccacggactggcccagctgtaccaagcccggcccatgctggctccccactttgtggacctcttggatcaggtggactctgagctgagggagcccctgaaggtggtgttgcggcaggtggtggtgtccaggccgggcagggatgaagctctttgctggcacctgcaaatgctggcaaaggtggcagatggagatgcccagagtgctaccctcaactttctacaggccgcggctgcccactgcacgaactgggacctacagcagggcctgctgcgggtctgccgggcgctgctgcgggcaggggtgaggggcggcctggtcgacttgctgcaggtgctggccaggcagctggaggaccctgatgggcgtgaccacgcccgcctctactacatcctgctggcacacctggcagcacccaagttgggggtggccctgggcccctcgcttgccgcacctgcactggcctcttcactggtggccgagaaccagggctttgtggcagcactgatggtgcaggaggcaccggccctggtacggctgagcctggggtcccatcgggtcaagggcccactcccagtgttgaagctccagccggaggcgctggagcccatctactctctggagctgcgcttccgtgtggaaggacagctgtatgcacccctggaggctgtccatgtgccctgcctgtgtcctggccgccctgcccgccctctgctcctgcctctgcagccccgatgcccggcccccgcacggctggatgtccatgccctttacaccacatccactggtctcacgtgccatgcccacttgccacccctgttcgtgaactttgccgacctctttctgcctttcccgcagcctccagagggggccgggctgggcttctttgaggagctctgggattcctgcctgccagagggtgctgagagtcgtgtgtggtgtccacttgggccacagggcctggagggcttggtgtcccgccacctggagccttttgtggtggtggcccagcctcctaccagctactgtgtagcaatccacctgcccccggactcaaagctgctgctgcggctggaggcggccctggcagatggagtgcctgtggccctgcggaccgatgactgggccgtgctgcccctggcgggggactacctccgtgggctggcggctgctgtctgagccccgggagaccaggtgggggcaggactgtggcccttgtgggggccaaggcacactcctgtagctctgtcgccaaaaccctgcattccgcagtgccctcgctggcttgttttcttttgggccccggttgggagcaggctcctgggggtgagggtctgtctgagtctgtttttgctgctctagcaagatccctgagacggggtaagttataataaacagaaatgtattggctcagagctctggaggctgggaagtccatagtggagggcccagagcccagtgaggacccttctgcatcttcccatgacagaggacagagtgacaggagtgaggggagagagcgaacccactcccaagataacggcctgagtccacgcaggagggcagagccctcgtggcctgaccacctcttagggtctaatcttatactgttacagtggcaatcgcatttcaacgtgagcgtgggaggggacaaacattcaaaccatagcagggtcataggccccaagaaggcttccagacagaacccggcactgtagagctacagagttccttctcacccagacacactagtgctctccagaatctctgcccaggaggcaggggaaaaatctcctttctgcttcccagagagggtctggccttgcccaaggccactcagtgatttaggaagaaggctgaagctagagtgtggacctgacctgttggacagtacttttctttctttttttttcggggaggggttaaagacaggatctcactctggcgctctggagtgcagtggtgtgattagggatcattgcagactctgcctctcaggctcaggtgatcctcccatctcagcctgcctccgagtagctgggactacaggtgtgagtcaccactgtattttttgcagacaggatctccctgtttcctaggctggtctcgaactcctgggcttaaatgactcttctgcctcagcctcaccaaagtgttgggattactggtgtgagcccccacacctggccgagccagcgcttctcaactcccaaggtttgcaagctccctgccccagggagctcacgccaggcaggccagtgggcctaagccagaaacagaaagacagcagtggccaggtggagagcttcccaagctgtgccgattagagccagctctaggaagggcctgctaataaggtctagggtctgagaccaagttttttctaatctcagcccctaagaaacctaatttgtgcttaggaatcttcccaggtaagaagaactagttcctctagttgttgtttttttttcccaaacatgcaaacactgaggattgagctgtgtggggtcagctgtgctgccaggcacatgtacgttgcctcatttcatccttgcaacagctctgcagggccccgcagatgaggaaatccgtaggcaggagcggttgagtgattttcctaaggtcacccagctgtttggtaatagtgttttgtcatctggtagcaggtttccattaccatgccatcagagcagacctcagccagggccacagaggtcccaaccgtctctgccctcttctgctgcccctgcctcatgggctcccagccacaggttccccatgggccagctttacgcctcctgatccttccgattggggcagactaggagaggaaagacgggcctgggctgggtgcggtggctcatgcctgtaatcccagcactttgagaggctgcggcgggtggatcacctgaggccaggtgtttgagatcagcctggccagcatggcgaaaccctgtgtctaataaaaatacaaaaattagccgggcgtggtggcgggcgcctgtaatcccagctacttgggaggctgaggcaggagaattacttgaacctgggaggcagaagttgcagtgagccgagatcacgccactgcactccagcctgggcgacagagcaaggctctgtctcaaaaaaagaaaaaaaagaaagggcctgggacagtggtactgttaataggtggagtcaggaggcctgtctcaaacttgagatgtggcaataacttgctttgtcacctcggcaagtcatttccaaatcaggaaggggtcagtttcaggaaacagaaacttctccagctgtttttggcagaaggggatttaagggaatcagggtacttaaagtacatgggaaggctggagaagtcgcctccaggaagctcccactggagctgggatcagaacgtactgtcctgcctgccatcccctgtaagcacccaggaagctgggcttgggccctgggacatggggtgggactgccactcctgcctcctgacacccacaaagccagaagcgtggtgctgctgcagaaggactgaacatctccaaggctgggcccgcagagcaaacttccttggccctgtgtcctccatccatatccttcaaaggacacctcattagtggactccatttctctcttccacggaactccagtggcaagggaatccagaaacgttttctttttgcctggagatgctaatccttagcctaagaataaggaaactggtccatgtaaggactgaccatcctttcacccatctgtctgcccacttgtgcatccatcccattttatccatccattcctccagttgtggacaccagatgactttcagctccccctaccccaaccagaactttgctgcaatggccattcttatatgcccctatggacccatgggacaattctctgggatacatgctaggagcagaattgctgaatcatagggaatgcatgtgcttagcttggctaagcaatgttggagtaaaagcttttggttttgcatcttctcagcacttctagggaggcaccaaaagggaggatggcactgactgagcccacctgagatagctcctagaccccagccctctgtgtcctcagaatcacacactgctgctcatcacttcagcttcccgaagatcatggcaatagcagcatgcctgtaactgtcccaagtacaaccaaaaattcttcctaaagagagggaaccaaagtcacacgggtcaccttgtccacctgtgtggacgttgctcatgttcacatacccttccttgcctccttcaaggcaggtctggccacaagcccagctctggctaatgaaatgtgaagggagtcaagggccgggggcggtggctcacacctgtaatcccagcattttgggaggccgaggtgggttgattacctgaggtgaagaatttgagaccagcctggccaacatggtgaaacccgtctctactaaaaatccaaaaattagccgggtgtggtggcgtgctcataatcccagctactcaggaggctgaggcaggagaatcgcttgaacccgggaggtggaggttgcagtgaactgagattgggccactacactccagcctggatgacagagcaggactccgtctcaaaaaagaaaaaagaaatgtgaaggggtcagttttggggcaaaatatgtcattgccagtgctcaattttccagccctctcttcctctgccatgaccgttggggaagtacatgttgagatggaggtgctaaatagttgagtcataatctcacctggatacgctgtaacaaatgccctggattatcaaatcagttatgtaaactaaaaatcctaaaaccccaccgactgaacagatgccacctcgtggccgagggaatctcagaaaaaacttaaaacaattcctggccctgatgggttgggaggtcagatgcaacttgttataccccatccctttatggtttagacacagctgccgagcatgaatgaacaaaatagggatcatgagatggacagaacagacactgtggcaataagataccaaattgtaaacaggacctaaggccatgccaagcaagggttaagtcatgtagagcccaccttcatgccccgcctcccctgcccccaacttatgaataaactatgttctaactgca

SEQ ID NO: 344 - DNA, 2310 bp, Homo sapiens
ggagtttcaagcagccgcggcggcagcagcagccctggacgcagcagccaagctcttcgctggctcccgggggctctcccgggttcctctcattgcaggctgaaggtaatgagaggccctaagatcccagaggatgccataagaggaaaagtcaggggagtgttgaagactctgcctcctacaaatatccgtgaacataccacaccagcaagaacaataagagccaagggtctgaattgtttaatcaaaggaagagtcaaaataagctacacccagattactgagaaaggtgaaatgaaaacaagctcaaaaccaaattccaggaagatgctgtctttgtattgacttaccatttcatgttttcacacatgtcaaagtcttgaagcttcggtcattagtcttccgcttcctaaagcaagaaactaaatgctgacttgtgtcgtttgccccagatgccaccggaaatgtcatcttctccccagacgctggcttgcaagcacagcagcacccagaggctaacctatttcccctatagcccaagctctgagatctcccgtctggtcacaatgatctacaggagaggaagaaagctatctagggacgagatctagaatcaactgagagagatgcttaaaaatcaccagttactttaatgaccatccgcagagccatcctgtgcaaaggaaggagctaggctgtgcgccctgggcgtcatgatccttctgcgggcctccgaagtgcggcagctgcttcacaataagttcgtggtcatcctgggggactctgtgcatagggcagtatacaaggacctggtgcttctgctgcagaaggaccgcctgctcactcccgggcagcttagagcaaggggggagctgaacttcgaacaagatgagctggtggacggaggccagcggggccacatgcacaacggccttaactaccgtgaggtccgcgagttccgctccgaccaccatctggtacgtttttacttcctcacccgcgtgtactccgattacctccagaccatcttgaaagagctgcagtcgggcgagcacgcccccgacctggtcatcatgaattcctgcctctgggacatctccaggtatggtccgaactcctggagaagctacctggagaacctggagaacctgttccagtgcctgggccaggtgctgcccgagtcttgcctcctggtgtggaacacggccatgcctgtgggcgaggaagtcaccgggggttttcttccgcccaagctccggcggcagaaggccaccttcctgaaaaacgaagtggtcaaagccaacttccacagcgccaccgaggcacgtaaacataacttcgatgtactggacttgcatttccacttccgccacgcgagggagaacctgcactgggacggggtgcactggaatggacgtgtgcaccgctgcctctcccagctgctgctggcccacgtggccgacgcctggggtgtggagctgccccaccgccaccccgtgggcgagtggatcaagaagaaaaaacctggcccgagagtcgaagggccgccccaggccaacagaaatcacccggccttacctctgtccccacccttaccttcccccacataccgccccctgcttgggttcccaccccagcgcttgccgctgctcccgctcctgtccccacagcctcctcctcccattctccatcaccagggaatgccccggttcccacagggtcccccagatgcctgtttttcctcagaccatactttccagtcggatcaattctattgccattcagatgtcccctcatcagcccatgcaggtttcttcgtcgaagacaattttatggttggtcctcagctgcctatgcccttcttccccacaccccgttatcagcggcctgccccagtggtacataggggttttggcaggtatcgtccccgtggcccctatacgccctggggacagcggcctcgaccttcaaagagaagggccccagccaatcctgagccaaggcctcaatagacggacctaggccttatttcctctttatgaacatggattggacagatctgacacttcctttccattgcttggcctgaacagactgaccttgttaacttaagcctggagtccatgcctcgtcttccttttgttcattgctgttaccaagaaagccaaggaagagcagcctgactcattcttcttggctgcagcctcttccccacttcctgggagtgacccagcgttattcctgcctcctcactcctattctctttgcctttgtgtaaaaataaaatggaaataaacaagttgcacagaa

SEQ ID NO: 345 - DNA, 3054 bp, Homo sapiens
agacccttccagctgccgctgtcgtctttgcttcagccgcagtcgccactggctgcctgaggtgctcttacagcctgttccaagtgtggcttaatccgtctccaccaccagatctttctccgtggattcctctgctaagaccgctgccatgccagtgacggtaacccgcaccaccatcacaaccaccacgacgtcatcttcgggcctggggtcccccatgatcgtggggtcccctcgggccctgacacagcccctgggtctccttcgcctgctgcagctggtgtctacctgcgtggccttctcgctggtggctagcgtgggcgcctggacggggtccatgggcaactggtccatgttcacctggtgcttctgcttctccgtgaccctgatcatcctcatcgtggagctgtgcgggctccaggcccgcttccccctgtcttggcgcaacttccccatcaccttcgcctgctatgcggccctcttctgcctctcggcctccatcatctaccccaccacctatgtccagttcctgtcccacggccgttcgcgggaccacgccatcgccgccaccttcttctcctgcatcgcgtgtgtggcttacgccaccgaagtggcctggacccgggcccggcccggcgagatcactggctatatggccaccgtacccgggctgctgaaggtgctggagaccttcgttgcctgcatcatcttcgcgttcatcagcgaccccaacctgtaccagcaccagccggccctggagtggtgcgtggcggtgtacgccatctgcttcatcctagcggccatcgccatcctgctgaacctgggggagtgcaccaacgtgctacccatccccttccccagcttcctgtcggggctggccttgctgtctgtcctcctctatgccaccgcccttgttctctggcccctctaccagttcgatgagaagtatggcggccagcctcggcgctcgagagatgtaagctgcagccgcagccatgcctactacgtgtgtgcctgggaccgccgactggctgtggccatcctgacggccatcaacctactggcgtatgtggctgacctggtgcactctgcccacctggtttttgtcaaggtctaagactctcccaagaggctcccgttccctctccaacctctttgttcttcttgcccgagttttctttatggagtacttctttcctccgcctttcctctgttttcctcttcctgtctcccctccctcccacctttttctttccttcccaattccttgcactctaaccagttcttggatgcatcttcttccttccctttcctcttgctgtttccttcctgtgttgttttgttgcccacatcctgttttcacccctgagctgtttctctttttcttttcttttttttttttttttttttttaagacggattctcactctgtggcccaggctggagtgcagtggtgcgatctcgactcactgcaacccccgcctcctgggttcaagcgattctcctgccccagcctcccaagtagctgggaggacaggtgtgagctgccgcacccagcctgtttctctttttccactcttcttttttctcatctcttttctgggttgcctgtcggctttcttatctgcctgttttgcaagcaccttctcctgtgtccttgggagccctgagacttctttctctccttgcctccacccacctccaaaggtgctgagctcacatccacaccccttgcagccgtccatgccacagccccccaaggggccccattgccaaagcatgcctgcccaccctcgctgtgccttagtcagtgtgtacgtgtgtgtgtgtgtgtgtgtgtgtgtgtgtgtttggggggtggggggtgggtagctggggattgggccctctttctcccagtggaggaaggtgtgcagtgtacttcccctttaaattaaaaaacatatatatatatatatttggaggtcagtaatttccaatgggcgggaggctttaagcaccgaccctgggtccctaggccccgcctggcactcagccttgccagagattggctccagaatttttgccaggcttacagaacacccactgcctagaggccatcttaaaggaagcaggggctggatgcctttcatcccaactattctctgtggtatcaaaaagaaaaaaaaaaaaaaagaaggagtcggggccgggcgtggtggctcacgcctgtaatcccagcactttgggagaccaagtcaggcaatcatctgaagtcaggagttcaagaccagcctggccaacatggtgaaagcatgtctctattaaaaatacaaaaattagccgggcgtggtggcgggcgcctgtaatcccaggtatttggggggactgagacaggagaatcccttcaacccgggaggtggaggttgcagtaagtcaagatggcaccactgtgctccagcctgggggacagagcgagactccatctcaaaaaaaaaaaggaatcggacgaagaaccacaggatgttgaagacaactgtctgaagtatttgtgagggacagcgatgtggccctctgtgttaagaataacgtgtcctgctttggcagagagaagaaaatagccactgcccgctttcaaggcaagatcgaccttttctgttttgttttgtttttctttctttttcctggccatgaggacaaaaattactgagtggcccttaaagagggaagtttgttttcagctgttctcttttgcccgtaggtgggagggtggggattgctgcgtcctagctagaggaatggctttgcttgaatgtgtagtgcacacgcacgggtgtttctgtgtgctagttgcttcttgctgctgcttcctgcttgtctgggactcacatacataacgtgatatatatatatatatatataaatgtataaatatatattttatttttttttaaatccctggagcttctggttcctatcagttcctgttgttaatcgtagaaccgttgtcccttcccccattcccgtatccatcatgttctttttcttttaaatatcaatataaaggtaaaagaa

SEQ ID NO: 346 - DNA, 1360 bp, Homo sapiens
aggctgcgggaaagcggtgcgcgtgcagcggggtgggtgccctggtccgcgggcgagctcgagcagccaaccccgggcgcgtcggggccatggacggcctgaggcagcgcgtggagcacttcctggagcaaaggaacctggtcaccgaagtgctgggggcgctggaggccaagaccggggtggagaagcggtatctggctgcaggagccgtcactctgctaagcctgtatctgctgttcggctacggagcgtctctgctgtgcaatctcatcggatttgtgtaccccgcatatgcctcaatcaaagctatcgagagcccaagcaaggacgacgacactgtgtggctcacctactgggtggtgtacgccctgtttgggctggccgagttcttcagcgatctactcctgtcctggttccctttctactacgtgggcaagtgcgccttcctgttgttctgcatggctcccaggccctggaacggggctctcatgctgtatcagcgcgtcgtgcgtccgctgttcctaaggcaccacggggccgtagacagaatcatgaacgacctcagcgggcgagccctggacgcggcggccggaataaccaggaacgtcaagccaagccagaccccgcagccgaaggacaagtgaagcagccccctgagcctcacaaggacctcctggctggtgaggagggggccgcgccaggctcccaggcctccacagagtcttcagcgcatcccccaacagcagcccctgccagtccctcgggtccaggcaaggccctgggggtctccttaaatgccacctcgggcaagtcccagtcccagtcctcggccacccccagctctggatcccagggccagctgccctctggctctggctgtggctcccgcctgtccggcagggcccagggccagcgtcgggcacagggcagctcccactggtctcggcaacacacccagccgcctggtacttcctccagcccctcccagtcagccctcccgtcctcggggcccctgcagccacccaacgtcacctccagcccggtctcacccatggtccagtctcccagcagcagcaacatccccacgcagccccccagcaagtcctctggcaagccggaggacgcagcccccaagaccagcggacagcgccagaaggaatcgtcgaaacagcctgccagcagcgcctcagtgcccgagctggtcccctgccattccgggacctctctggagtacacttcggagtccaccaccgagatcacctgcagctggccacaccacaggcccccgtgcctgcagcactactggtgcctgaaacacctggcctgctaggaggctccaataaagctaacccggaccaga

SEQ ID NO: 347 - DNA, 5125 bp, Homo sapiens
agaagcaggttggctgtgatgacagcacagagctcaggaacgctgcctgaggaccctggggcctacgaggaggagaagagggcaggagctggtggggtgcttgcagagaccctgggctcctatcctgccataagcctcgctgtctcctgatatctgcagccaggccctactgacacccccaggcctgagtgcaagcagagaccccaccattcccaggccctggaggactggtccaccttaactgggcagcccttggggcaggcgctggccggtgcctcagcccaggcctctgtgctctgcatgcactgccagcctgccatcaggcctctattgcagccctgaaccatgatccagggcaccttggagccagatggtcccctctggggctgggactgggacagtgacaatgactgggatagtgctgtgctggccctcctggcgctggctgtggtggctgccacagcgctggccttacactggtttggctccgggcacgatcaagaggcggcagaaccggtgtccacagccctcggggctcaacctcatcaggcaggaggagctgagctggccctgcaaccgaagtctaaggtcagtgatggcagcgaggggcagagcccagggcaggggaaaccagagcccccaggacgcggccagcagagccctgtccctgctgcagcgccgggcgggggcctggccgccatggcccggcttccactcaagacggctgtcgaggaggcccgcagagaggcattaggacagcaacggggcagtgccacccccgcggccccccgagcggaaggaaaggagcctcccaggccaggcactgccctcctgggcaggagcgaagcaggggggatgtccgcccccctcctgatccacttcactcctcggagccctggcagcgaagcggaggcggagacaggtggtgtcagggcgtcctctcgccaggccgcaggccccgcggggcaacaggacactggcccctggcaggcgggcgcggggccctcgggctcgatggggagaggccggggccggcggcggcggatggacgctggctcgggagacagagcccgccgcccccggaaactggacccgctccgcctgggcgccgcggggagcgtgtgggacgcggtggacggggccgccgccctggacgcccacgcgcgcggcctccccacaggacccccactcgcccaggagcccgcactcccggcgctgcccgctccccgcgccctgcagcctgggtctcagacggaaggctctggggccaagggtggctggagcagggaggcctcgggggtccctgcccccggaggaggctggccctgggtcagcagggaggtcccgggcacccggagctttggcccagccccagactccacgcgcccctggctagagagtccgcctcaaggtcgcccactctcgtcccaagggccgggtgccacaggggcctacgatgccggcgaggccggggctgacagctcccgagataacagtcctgccgctgacctggggcccacccggcccccggagcaagcaaagccggctgcagccggccacagccgcgcgccctcccggagccgtgagcctcgcccgcgctccgcctccccgcccgcagctcccggcccggggttcccacctgaagccctgactctcccctctccttcagactttttgcccctggaggttacccaggatccttccgtgggcgaaaatctcagagcggcgccagccccaagttcagcctcagcccaagtcttaacttcagctccagcctcagtcctagccccagccctggcttcatcccccagctcagcaccaacctcagccaccacctcaacctcatcccccacctcagccccagccccagctccaacctcagctccaacttcaaccccagccccagccccaagtccagctgcagccgcaactccagccccagccccagtcccagtcccaaccctcacacccccatccccagccctaaccccagtcccaaccccagccctaagcccagctccaactccagccctaaccccagccgcatccccagccctaaccccagtcccaaccccagccctaagcccagctccaactccagccccaaccccagccgcatcccctgccccagcccccacctcagccccaaccccaaccccagccgcatcccctgccccagctgacgggtcaaagcctcaggagagtgtggctctccccaggcgctaccaggaggggcaggtctcagccagctggggaaaccttattgccatggttcttagaagccaccccttccccaggcaagacaggccccaagggagtgtcccgagggcggttcccgggagccccgtgggtcccagcacttccacacactctgaggacagacacggcccctcttcttcagtggggacagtcatagggacaggtacagggggcctggttgaggctggaggtcagccacagccaagaagctccgagaccaacggatcgcccagcccagaccctcccccaggcctaagaggagagggaaccagggagaaaagtctagacccgctgccccaagccgcgatgcccaggggccccgcacagccccccgcgcagaggccgcctggccccgcggcctcctcctctgcgaggcgctcacagccggtaccccagctacggaaacgcagcaggtgcgaaatcgccccgagctcggagcaggaggtcaggccggccgcctcgggggaccctcaaggggaggcgccgggggaggggggcagccctgccggccgcagcggggcgctcacggaaaagcaggaggaggcccggaagctcatggtgtttctgcagaggcccgggggttggggggtggtggaggggccccggaagcccagctcccgggccctggagcccgccacggcggcagccctgcggcggcggctggacctgggcagttgcctggacgtgctggcctttgcccagcagcacggagagcccggcctggcgcaggagacctacgcgctgatgagcgacaacctgctgcgagtgctgggagacccgtgcctctaccgccggctgagcgcggccgaccgcgagcgcatcctcagcctgcggaccggccggggccgggcggtgctgggcgtcctcgtactgcccagcctctaccaggggggccgctcagggctccccaggggccctcgtggcgaggagcctcctgcggcggcccctgtgtccctgcctctacctgcgcacctgcatgtgttcaacccccgggagaacacctggcggcccctgacccaggtgcccgaggaggccccgcttcggggctgcggtctctgcaccatgcacaactacctgtttctggcggggggcatccgtggctccggtgccaaggccgtctgctccaacgaggtcttctgctacaaccctctgaccaacatctggagccaggttcggcccatgcagcaggcccgagcccagctcaagctggtggccctggacgggctgctctatgccatcggtggcgaatgcctgtacagcatggagtgctacgacccgcgaacagacgcctggaccccacgcgcgccactccccgcaggcaccttccctgtggcccacgaggctgtggcctgccgtggggacatctacgtcaccgggggtcacctcttctaccgcctgctcaggtacagccccgtgaaggatgcttgggacgagtgcccatacagtgccagccaccggcgttccagcgacatcgtggcactggggggcttcctgtaccgcttcgacctgctgcggggcgtgggcgccgccgtgatgcgctacaacacagtgaccggctcctggagcagggctgcctccctgcccctgcccgcccccgccccactgcactgcaccaccctgggcaacaccatttactgcctcaacccccaggtcactgccaccttcacggtctctggggggactgcccagttccaggccaaggagctgcagcccttccccttggggagcaccggggtcctcagtccattcatcctgactctgccccctgaggaccggctgcagacctcactctgagtggcaggcagagaaccaaagctgcttcgctgctctccagggagaccctcctgggatgggcctgagaggccggggctcagggaaggggctgggatcggaacttcctgctcttgtttctggacaactttccccttctgctttaaaggttgtcgattattttgaagcccagactccctcagcctctttctgcccctcactccacacccagactgtttcctgactcaattccgtacctacttacagaccctctcagcttgctgacacccccctgtctgtgggactccctattccctagagccagggactgatgcgtctccacagacaaggacttggctcgctggagctctgctgagccgagagaggagggggtagaaaacattcacacttcctatgctctgtcagcaggacagggagcaaaaacgtccccaggcaacgccctcgcctctgggactttctgcctgtcctaaggcctccccaggtaccaaccccgtagctatctgggtctgtttggcactgtggattctcaagggcctagaacccttgcctctgaaactggtccgctggtgcagccctgctgtctgcagctcctgcccatacccccagcccacaccaggccaggcccactccgggctcaccaccctctgcagccttgtggggctctcccagcccctccagaagcccaccccacttctcgccaacccccgatctctaaatgaggcctgagcgtcaccctagttctgcccctttttagctgtgtagacttggacgagacatttgacttccctttctccttgtctataaaatgtggacagtggacgtctgtcacccaagagagttgtgggagacaagatcacagctatgagcacctcgcacggtgtccaggatgcacagcacaatccatgatgcgttttctccccttacgcactttgaaacccatgctagaaaagtgaatacatctgactgtgctccactccaacctccagcctggatgtccctgtctgggccctttttctgttttttattctatgttcagcaccactggcaccaaatacattttaattcaccgaaagca

SEQ ID NO: 348 - DNA, 3201 bp, Homo sapiens
gcagactcttgtgtgcccgccagtagtgcttggtttccaacagctgctgctggctcttcctcttgcggccttttcctgaaacggattcttctttcggggaacagaaagcgccagccatgcagccttggcacggaaaggccatgcagagagcttccgaggccggagccactgcccccaaggcttccgcacggaatgccaggggcgccccgatggatcccaccgagtctccggctgcccccgaggccgccctgcctaaggcgggaaagttcggccccgccaggaagtcgggatcccggcagaaaaagagcgccccggacacccaggagaggccgcccgtccgcgcaactggggcccgcgccaaaaaggcccctcagcgcgcccaggacacgcagccgtctgacgccaccagcgcccctggggcagaggggctggagcctcctgcggctcgggagccggctctttccagggctggttcttgccgccagaggggcgcgcgctgctccacgaagccaagacctccgcccgggccctgggacgtgcccagccccggcctgccggtctcggcccccattctcgtacggagggatgcggcgcctggggcctcgaagctccgggcggttttggagaagttgaagctcagccgcgatgatatctccacggcggcggggatggtgaaaggggttgtggaccacctgctgctcagactgaagtgcgactccgcgttcagaggcgtcgggctgctgaacaccgggagctactatgagcacgtgaagatttctgcacctaatgaatttgatgtcatgtttaaactggaagtccccagaattcaactagaagaatattccaacactcgtgcatattactttgtgaaatttaaaagaaatccgaaagaaaatcctctgagtcagtttttagaaggtgaaatattatcagcttctaagatgctgtcaaagtttaggaaaatcattaaggaagaaattaacgacattaaagatacagatgtcatcatgaagaggaaaagaggagggagccctgctgtaacacttcttattagtgaaaaaatatctgtggatataaccctggctttggaatcaaaaagtagctggcctgctagcacccaagaaggcctgcgcattcaaaactggctttcagcaaaagttaggaagcaactacgactaaagccattttaccttgtacccaagcatgcaaaggaaggaaatggtttccaagaagaaacatggcggctatccttctctcacatcgaaaaggaaattttgaacaatcatggaaaatctaaaacgtgctgtgaaaacaaagaagagaaatgttgcaggaaagattgtttaaaactaatgaaataccttttagaacagctgaaagaaaggtttaaagacaaaaaacatctggataaattctcttcttatcatgtgaaaactgccttctttcacgtatgtacccagaaccctcaagacagtcagtgggaccgcaaagacctgggcctctgctttgataactgcgtgacatactttcttcagtgcctcaggacagaaaaacttgagaattattttattcctgaattcaatctattctctagcaacttaattgacaaaagaagtaaggaatttctgacaaagcaaattgaatatgaaagaaacaatgagtttccagtttttgatgaattttgagattgtatttttagaaagatctaagaactagagtcaccctaaatcctggagaatacaagaaaaatttgaaaaggggccagacgctgtggctcacacctgtaatcccagctctttggaggccgaggcaggcggatcacttgaggtcaggagtttgagaccagcctgaccaacatggtgaaactccatctctactaaaaatataaaaattagccgggcatggtgatgcatgcctgtaatcccagctactcgggaggcttagacatgagaatcacttgaacccaggaggtggaggttgcagtgagtcaagatggcaccactgcactccatcctgggtgacagagcaagacttcctctcaaaaaataaataaataaataagaaaaataaattaggaaattattaaaataattttttagaaaagcaacaaaataacaaaaattagtgactgtaataattggaatgtttgaaatttgtcacagcaataattgactaaaatgaatgtaaataattattcagttttcagtttgttgtaataaactctaatcagtataaaggattgactatcctaggaaaaagattagtcaaggaataagaagcaaaagtagtatttgaaatctaaaaacattaccatgtttgctttatcatgcaggcaaataaataaataaatgacatttttaggttggaataaaaaaagataaagtacatattgccttaattaaattcatcaagttcttactgaaaaacagctctccgccgtgcctggccaggaaatacataattttttttttttttttttagatggagtctcgctctgtcgcccaggctggagtccagtggcatgatcttggctcactgcaagctctgcttcctgggttcatgccattctcctgcctcagccttccgagtagctgggactacaggtgcccgccaccacatccggctaattttttgtatttttagtaaagatggggtttcaccatgttagccaggatggtctcgatctccttaccttgtgatccgcccgccttggcctcccaaagtgctgggattacaggtgtgagccaccacgcctggctgaaatacataatcttaaaagaaaacataagatactttattttaatatacgtgactaaatgtaaaacctaacttattttctgttatctatttatttttactttcagtaacactttttttattttaggtagcattcagcctagaggcaactgctgtttgttaaatatttcctgttcatatattttgcacattttcttatgggttagttttcttctcattgttttgggaagttcttaatatatttggggtatttatctttcattcgttgtctgtgtaacaaataacttctgccatatgggttgtctgcacattttttggtgtcttttagtaaacaaggtttttttgttttgtattgttttgtttattgtaaagatttttaaattttaatggagttgatttcttttctcattcaagcttttgagaataaattggagttgaattttt

SEQ ID NO: 349 - DNA, 1139 bp, Homo sapiens
gtttagtctatcgctgcggttgcgagcgctgtagggagcctgtgctgtgccgcgcagttaggcagcagcagccgcggagcagtagccgccgtgggagggagccatgaagcattacgaggtggagattctggacgcaaagacaagggagaagctgtgtttcttggacaaggtggagccccacgccaccattgcggagatcaagaacctcttcactaagacccatccgcagtggtaccccgcccgccagtccctccgcctggaccccaagggcaagtccctgaaggatgaggatgttctgcagaagctgcccgtgggcaccacggccacactgtacttccgggacctgggggcccagatcagctgggtgacggtcttcctaacagagtacgcggggccccttttcatctacctgctcttctacttccgagtgcccttcatctatggccacaaatatgactttacgtccagtcggcatacagtggtgcacctcgcctgcatctgtcactcattccactacatcaagcgcctgctggagacgctcttcgtgcaccgcttctcccatggcactatgcctttgcgcaacatcttcaagaactgcacctactactggggcttcgccgcgtggatggcctattacatcaatcaccctctctacactccccctacctacggagctcagcaggtgaaactggcgctcgccatctttgtgatctgccagctcggcaacttctccatccacatggccctgcgggacctgcggcccgctgggtccaagacgcggaagatcccataccccaccaagaaccccttcacgtggctcttcctgctggtgtcctgccccaactacacctacgaggtggggtcctggatcggtttcgccatcatgacgcagtgtctcccagtggccctgttctccctggtgggcttcacccagatgaccatctgggccaagggcaagcaccgcagctacctgaaggagttccgggactacccgcccctgcgcatgcccatcatccccttcctgctctgagcgctcacccctgctgaggctcagcccctcaacccggtggcattctgggggaggagtggggcccacagctctccagcacccggaataaagcccgcctgccccagtcgga

SEQ ID NO: 350 - DNA, 12510 bp, Homo sapiens
agacggtgatagcgagccacgcattcacagggccactgctgctcacagaagcagtgaggatgatgccaggatgatgtctgcctcgcgcctggctgggactctgatcccagccatggccttcctctcctgcgtgagaccagaaagctgggagccctgcgtggaggtgtgaaatccagacaattgaagatggggcatatcagagcctaagccacctctctaccttaatattgacaggaaaccccatccagagtttagccctgggagccttttctggactatcaagtttacagaagctggtggctgtggagacaaatctagcatctctagagaacttccccattggacatctcaaaactttgaaagaacttaatgtggctcacaatcttatccaatctttcaaattacctgagtatttttctaatctgaccaatctagagcacttggacctttccagcaacaagattcaaagtatttattgcacagacttgcgggttctacatcaaatgcccctactcaatctctctttagacctgtccctgaaccctatgaactttatccaaccaggtgcatttaaagaaattaggcttcataagctgactttaagaaataattttgatagtttaaatgtaatgaaaacttgtattcaaggtctggctggtttagaagtccatcgtttggttctgggagaatttagaaatgaaggaaacttggaaaagtttgacaaatctgctctagagggcctgtgcaatttgaccattgaagaattccgattagcatacttagactactacctcgatgatattattgacttatttaattgtttgacaaatgtttcttcattttccctggtgagtgtgactattgaaagggtaaaagacttttcttataatttcggatggcaacatttagaattagttaactgtaaatttggacagtttcccacattgaaactcaaatctctcaaaaggcttactttcacttccaacaaaggtgggaatgctttttcagaagttgatctaccaagccttgagtttctagatctcagtagaaatggcttgagtttcaaaggttgctgttctcaaagtgattttgggacaaccagcctaaagtatttagatctgagcttcaatggtgttattaccatgagttcaaacttcttgggcttagaacaactagaacatctggatttccagcattccaatttgaaacaaatgagtgagttttcagtattcctatcactcagaaacctcatttaccttgacatttctcatactcacaccagagttgctttcaatggcatcttcaatggcttgtccagtctcgaagtcttgaaaatggctggcaattctttccaggaaaacttccttccagatatcttcacagagctgagaaacttgaccttcctggacctctctcagtgtcaactggagcagttgtctccaacagcatttaactcactctccagtcttcaggtactaaatatgagccacaacaacttcttttcattggatacgtttccttataagtgtctgaactccctccaggttcttgattacagtctcaatcacataatgacttccaaaaaacaggaactacagcattttccaagtagtctagctttcttaaatcttactcagaatgactttgcttgtacttgtgaacaccagagtttcctgcaatggatcaaggaccagaggcagctcttggtggaagttgaacgaatggaatgtgcaacaccttcagataagcagggcatgcctgtgctgagtttgaatatcacctgtcagatgaataagaccatcattggtgtgtcggtcctcagtgtgcttgtagtatctgttgtagcagttctggtctataagttctattttcacctgatgcttcttgctggctgcataaagtatggtagaggtgaaaacatctatgatgcctttgttatctactcaagccaggatgaggactgggtaaggaatgagctagtaaagaatttagaagaaggggtgcctccatttcagctctgccttcactacagagactttattcccggtgtggccattgctgccaacatcatccatgaaggtttccataaaagccgaaaggtgattgttgtggtgtcccagcacttcatccagagccgctggtgtatctttgaatatgagattgctcagacctggcagtttctgagcagtcgtgctggtatcatcttcattgtcctgcagaaggtggagaagaccctgctcaggcagcaggtggagctgtaccgccttctcagcaggaacacttacctggagtgggaggacagtgtcctggggcggcacatcttctggagacgactcagaaaagccctgctggatggtaaatcatggaatccagaaggaacagtgggtacaggatgcaattggcaggaagcaacatctatctgaagaggaaaaataaaaacctcctgaggcatttcttgcccagctgggtccaacacttgttcagttaataagtattaaatgctgccacatgtcaggccttatgctaagggtgagtaattccatggtgcactagatatgcagggctgctaatctcaaggagcttccagtgcagagggaataaatgctagactaaaatacagagtcttccaggtgggcatttcaaccaactcagtcaaggaacccatgacaaagaaagtcatttcaactcttacctcatcaagttgaataaagacagagaaaacagaaagagacattgttcttttcctgagtcttttgaatggaaattgtattatgttatagccatcataaaaccattttggtagttttgactgaactgggtgttcactttttcctttttgattgaatacaatttaaattctacttgatgactgcagtcgtcaaggggctcctgatgcaagatgccccttccattttaagtctgtctccttacagaggttaaagtctagtggctaattcctaaggaaacctgattaacacatgctcacaaccatcctggtcattctcgagcatgttctattttttaactaatcacccctgatatatttttatttttatatatccagttttcatttttttacgtcttgcctataagctaatatcataaataaggttgtttaagacgtgcttcaaatatccatattaaccactatttttcaaggaagtatggaaaagtacactctgtcactttgtcactcgatgtcattccaaagttattgcctactaagtaatgactgtcatgaaagcagcattgaaataatttgtttaaagggggcactcttttaaacgggaagaaaatttccgcttcctggtcttatcatggacaatttgggctagaggcaggaaggaagtgggatgacctcaggaggtcaccttttcttgattccagaaacatatgggctgataaacccggggtgacctcatgaaatgagttgcagcagaagtttatttttttcagaacaagtgatgtttgatggacctctgaatctctttagggagacacagatggctgggatccctcccctgtacccttctcactgccaggagaactacgtgtgaaggtattcaaggcagggagtatacattgctgtttcctgttgggcaatgctccttgaccacattttgggaagagtggatgttatcattgagaaaacaatgtgtctggaattaatggggttcttataaagaaggttcccagaaaagaatgttcatccagcctcctcagaaacagaacattcaagaaaaggacaatcaggatgtcatcagggaaatgaaaataaaaaccacaatgagatatcaccttataccaggtagaatggctactataaaaaaatgaagtgtcatcaaggatatagagaaattggaacccttcttcactgctggagggaatggaaaatggtgtagccgttatgaaaaacagtacggaggtttctcaaaaattaaaaatagaactgctatatgatccagcaatctcacttctgtatatatacccaaaataattgaaatcagaatttcaagaaaatatttacactcccatgttcattgtggcactcttcacaatcactgtttccaaagttatggaaacaacccaaatttccattgaaaaataaatggacaaagaaaatgtgcatatacgtacaatgggatattattcagcctaaaaaaagggggaatcctgttatttatgacaacatgaataaacccggaggccattatgctatgtaaaatgagcaagtaacagaaagacaaatactgcctgatttcatttatatgaggttctaaaatagtcaaactcatagaagcagagaatagaacagtggttcctagggaaaaggaggaagggagaaatgaggaaatagggagttgtctaattggtataaaattatagtatgcaagatgaattagctctaaagatcagctgtatagcagagttcgtataatgaacaatactgtattatgcacttaacattttgttaagagggtacctctcatgttaagtgttcttaccatatacatatacacaaggaagcttttggaggtgatggatatatttattaccttgattgtggtgatggtttgacaggtatgtgactatgtctaaactcatcaaattgtatacattaaatatatgcagttttataatatcaattatgtctgaatgaagctataaaaaagaaaagacaacaaaattcagttgtcaaaactggaaatatgaccacagtcagaagtgtttgttactgagtgtttcagagtgtgtttggtttgagcaggtctagggtgattgaacatccctgggtgtgtttccatgtctcatgtactagtgaaagtagatgtgtgcatttgtgcacatatccctatgtatccctatcagggctgtgtgtatttgaaagtgtgtgtgtccgcatgatcatatctgtatagaagagagtgtgattatatttcttgaagaatacatccatttgaaatggatgtctatggctgtttgagatgagttctctactcttgtgcttgtacagtagtctccccttatcccttatgcttggtggatacgttcttagaccccaagtggatctctgagaccgcagatggtaccaaacctcatatatgcaatattttttcctatacataaatacctaagataaagttcatcttctgaattaggcacagtaagagattaacaataactaacaataaaattgaatagttataataatatattgtaataaaagttatgtgaatgtgatctctttctttctctctctcaaaatatcttactgtactgtactcacctattttcagaccataactgaccatgaaacctgggaaagtgaaactgtggataagtgaggaactaacatacatacatgattgtttatctacagatgtatgcctcagtttcttagtatgcttgaaaatgtatgattttgtgtatatccgtgctacatgtaagtgtggttctattcatatttgaatatgaattctgcataagtgtgtttattcaagcaaatgtacaaggctctgagaaggaagatcaacatacaacttggaatatttcaaggccgaaatattcaaggctgacattggcctccttcctatcagttccctctcccagatggaaattctagaaatggcaggtgaggtggacaagcagggaaagaaattatatgcatagaacagaaggagaagaaagagtaaagtcaggcctcagccagcctctttttagctctttaaatcctctggatttaagagggataaagggtggaataaggataaattaatgccaattgtaatgccttaaatttgtgtgataccttacaacttgaaacatattcacaaaactatatatttgaatatctcattagctgagtaaggtagcaaatcataattaactttttccattttattgatgggaaagctgaagttcaatgaagtaaatttttcaatagcccacagagtaggaaagtgacaaaacctgagcctgggcctccaggtcactcaaggacactttctttcttccacacccaattgcttcatgcttaaagttggcaaaacaggaagtgaaactcctgcagttttctgtgtggttgacactagcaagggtttctcagttgaagccatgaatcattaagccaatacatatgcatatatgttatacataccaaatgatttatttataaccctatctttccataaaggacttgaaggagcttcaaacaaaggatatgtgaacaatagggttaatcaataataagtagaaaatctggacatagaataaaaagaggagagaaagacaccgagaatgagcgttaatacagtgctttccatttttctggtgttttgagtagcgtggcttttggagaaagccaaaactcaaattcactccttatcaactgtgtgccttgggctccatttctctgagagtctacttagctccaatgtaaaataagaatagaactatgactttgtaaggttgctctaaggattgaaaatcatgtattatgttcaatacggggacactgtccttatgggtgagtactcccctaagactttattaagagggcactaggagaagcactgggaggtcttctcagtaacaacactaaagtaattgctatttttccagcctgtggaaccacagaagtgactgtaactaaaattagacatttctttctgattcattctctactcacgggattgtcagaccccagtcttcttctggactctataaactttttagaaatcatcagcaggctcctggagaagcttaaatgaactcacacaatatgtgacagtgaactccctgggagagtgaaaaccaaagtctaagccagtgtctccatttacttgtgtgattgtgggcaagtcattcaagtgctttgaggctcaggtcttaattcatgaaatggaggtaataataccttgttggcagacctcacttggttaaaatgataatgttgatagttacaatagttacatttaattgatcaattgttttatgcaagggctttatttgtgctatctcagtttgtcacatcaatgaattagaaagatacgaaagtatttccaatttacaaatgaggagtctgagtctgggagtcattctgtcatgtgtccactgtcacctgctcattggtggcagcactgagattaggatctaagtccacttcaccgcagaagcagggcttctaaatactgttctatggcaagagcaccctgctctcacaaaatgcataaaacttcctatctcaccattataattttgactgatattaaacaaagagaagtattattattattacttgtttttatttatattacagctgtaagagccaggaaaaatgtgatctaagttatgtgatcaaagattttttaacagtgaacaaatcaggcccactagatgatggcctttctttgaacaacatgcctagggttgctctatcatgtctacagttggtctgacttcctgacgggcatcacagacttgtgattaaacacagaggttatgggggaagttccaaaagcttaggactttccagatggttggaataagatcacacactctggctgcccttatggagatcaccgaacttttcaactcaaagtaaaatctgtggagtaaatggtcgatcaaaaggaaccaactatattgagcaccatgcgtgatcatctgatcgttactgctaccttgtgagttaaaggctactcttctcattttagaaatgagaaaagagatgcccagagaggacgagtaacttgccttaggtcacacagcttatattaatcacaataacatttgccgcaccttctgtattttttttaagttgctaagcttttggtgcatgtctggcaccgttttagttgtatattatttcatttaattgttaaaatgaccttctgatgcaggtatttgtagctttgccattccacagatgaagaaacagatgaaaggactgaattgttcaataggaaggagcagaatcaggatatgaacttgggttggcctgattcttggggctgcattctttccataacataattgcttgctgtgatgtcctgggctactctgccaggggtggttagtggagtgaatggagaataatttagacaaggtcagtaactcccatgccatctagaaattaaaagtttaaaaggcagagtctgcaactctccttgatttctacagaaataaagatgatccctcctgtgacagtgctaagtgacaattctgagtgtaaatgcgctttttggcacaaattgtcctgtcctaatagtcttgattataattataaaataatgggtttctgaaaggctgcaagcagttctgggaatggcaataaaggtttagaaatgacgtgatgtttatgagagaagtgttttgttgaaaattaaactcacgtttaggagaaaggattgtgttgtatgctcctaggaaactatctcactatgtaattaaatcaaaaccagccagttaccaatttgagctcttgactcatactaacaacaccccatttcccatgggccaagcaaggcaggactgacctgaaataacccagcctgactctatccacagccaccccaggaccttgcccctccgtcttcctagggctcggccgtgagatgctagtgcatgacccttcctcttcctgggactgtccttgtctttccctttggactctgggaggtctgttctcctcctcagaaaggaataaacactctttctatttgtgggattccctaggagacactatataaaaatatagagttaaaaaaactatttaaaaaaaagacaacttcatgtctctactctgacttcattctttttaagatgggtaacaaagactctcttcaaggttagaaaattttattttaatttttatagatttagagagtgcaaatgcagttttgttacatgaatatattgcataatggtttagtctgggctgttagcgtaaccatcaactgaacagtgtactttgtacctattaggtactttctcatcccttaaccccttcccacctttctgagtcctcaatgtctgttatttcattctccatgtccatgtctacaaattatttagtttccactcataagtgagagcatggatggaactggagaagagtattttctatcccaagatcggttccttgatcttgtgtctccaaatcacttgctctctctcttacatcttttctatcttcttctagcctctttttgcaaacttcattttgacaaagaattccaggcagtctacagctgattttatttcaatacaacgattaaaatggaaaccatatatgaagatgacaaagttgagcaggtcccaaactctcacttttaaacaaatgcttggcttaagaatcacttaatgactttcattctgctatctatgtgtctgtgtatctaggtactaattatctatctttatgatctttattgctagaaattctggttcaatatcagaggttagtcctaaggaatttatattttaaaatattctcccagttttcgtgcacagacagatttgggaattactgttataatggaaaatggagaataaccacccacatttaatatggttattggttttgttcttgagatttattgctaagattcatgatagcccaggcaaggtcagataatgtatttttattttacactgtatagttgattcttctcaatcccactagatcagactctttgggatactaggattggcctatttgatggtgagctcactacatccatttagatgttgtgtccatgcaatcattttagttctcctagtttctacctatcacgttgtcattttcccttctttatcatcctgggtagctgagaccccacataaatatataccagaaaaatgttgtggtcttttctaaactctctgaggcatctgttgtcaatgtgatgttgttttttgtttccagtccaaaatatatcaaagtaaaatttaactccacttttgctaagtattcatcttgccttgagtactaagattccaaaaatgactttcccctctgaaaaacacaggatttccttgcgaaaacttgctgggccactgccaatcttcccagaaactcctttttccttatcgttgaggggaattggggaagtgatcactgacggttgaaattcagtagttttggtctttaagctgagaccctgagtcttctgaggagtctactgctccccagtgggaaacacctgctgtcaaaattttcctgcttgcaaagagcacttttgaaattaatggcaggggatgaatatctggctagtgctgtgctcagctgagttattaatagggccttctgagtcctctctacacatcatctttggctgaattagctgtggtttcagcacctgagagtctagcaccactaaaggcagggaatacctttgccagtttctggcatattaacagctgagatcagataagtgaacagcgatagaggtagtgaggtttaggattcaggtctgccaccgggagcgcacctctgggctcaggtctctcatttgtaaaatgggacatttaggtcagatcagcattttcaaaagtgtgacatgttagtaaataagatgattttatgtggttgacagatgaatgtattacctttagtggttatatgtttattttcatggttacttttatttataataaattttgtgactagctaagaatcaattatctctttaaaatatatttaagtttaaaatgtgggccaacttaggaaaaaaacgggatgaaatgaattatataaaaggtatgcagatttggaaaaattttgaaggtgtcacaagaaagattggcagtcagaaaggaatgaaccaaacggctgctgagggtcaggccagctctctgacattctagcatgttcacatctccagggctgtttccttacctataaattgtggcaattggagtaaatgtccattccaggaattctattctatgattagaggtgtaacttcatcatccagattttccagcatccttaacatgtggttttagcgttctaaacctgatgatgctatatcaaaacgggagactcattcgtcaagtcatgatgtatccatgtatttataatatttcccatgttccctcatttctgaaaaggattaagctatcaaccccattgagttataggtgaaaggctgtggaaacaagacattgatagtgaaatggctccaccactaacaggctgttgaacaaaggcaaatctcttgatctctttgctctttggtctctgtttatctatgagataacgttatttttacgctgtcttctgtgaaagttttgagaatgaaatgagacagagcctccaataaaatttagggaagtgctacataaatgcaaggagttattatgataacagattgaaaactcctccaaggaggagtttctcttttgccccatgttataaactcaagaatatcttccattttgcctacatattccaaaagcttttaaattaagctatatgtcattcttacaggagtctcctctatttcagcaatgtgtatacttggtcagttttaattatcttaaaggagaagaatacagtttctctaaactcaagcacttttgtggactaatccttgcaattattctttcttctttcccatacttgacatttaaagtgatatctcccaggctcctacactgttagtcacagaggtaccattcgaccccttgtgcctcttaccatatgtgaatgcttgtcagttgagagtaaactttcttcataaatttcacagttgtggattgataaaaacagagaactctggttcctcattccttcctgctttctttcttgaaatgccattcatgatggtcccttatatcactatagggctgctatcatccttcatccttatgccactgcaaatagcaaccaacagtgtccttagtgccagcactcccaggcatgcccctttccaagcagcagggtcaagccgctcccttcctgagctgtggcatctgtctctaaatcatgcttcctccttgcctgctgcaggcccttgtctctgccctttactttttctggctcttgccacggttttgaataaaactcttccaaatatctgaagctcaattctgttgccattctaagctctctaaatgtcaccacaatcttccttcctttgcattttcttattgtgcactaagttagttcttgcttagtaagtcttgtctttctctctgctttgacctgtcagtattccaacttccttattttttgatgttcattttctccttgctctctttcttcctttcttgtctgtgaactccattaaccgcttctgcatgtgaccattaatgtgcctgtctttcttctcatgtattagagagaacaaaagctttgggaatcagacagatctgtgttctgatcctgtcttatggtatctgtcttgtttgtctcggcttaaaatggggataatatctacctctcagttttgttggcagttcagtacacggaaataaagttctcactttcttttttctccttga

SEQ ID NO: 351 - DNA, 3325 bp, Homo sapiens
ctctagtggcagccggttttgaggccggcctccggctttgaagttcctcaccgcgtctccttccctctccccaaagcctggatcaccgcccagcgtcaggcgaggggcgacgtctcgaggtaaaacggaggaggtgcgggacgcggagactgcgcgggcccggtagccctggagaggccgaggctctaggccgcgaggggcgggtgcaatggcggaggaacaggtgaaccgcagcgccggcctggcccccgactgtgaggcctcggcgactgcagaaactacggtttcctcagtggggacctgtgaagccgctggcaagtcaccagagcccaaggactacgacagcacctgcgtgttctgccggatcgcggggcggcaggacccgggcaccgaactcctgcactgcgagaatgaggacctaatttgcttcaaagatatcaaaccagcagcaactcatcattatcttgtggtgccaaagaagcatattggaaactgcagaactctaaggaaagatcaagtagaactggttgagaacatggtaactgttggaaaaaccattcttgaaagaaataatttcactgacttcacgaatgtgaggatgggttttcatatgccaccattctgttccatttcccacttgcaccttcatgttctggcaccagtggatcagcttggcttcttatccaagttggtttatagagtcaattcctattggtttatcacagctgatcacttgattgaaaaactaagaacatgaaaatgtcaagagtggaagatttttctaatcttggttcagcatgaagtggtatttaggtcccttttaagtctaattgcaattttaagatttgttgggttttatgagaggctgttacttagtggccttaaatcttttctgaatgtctgtttcctaagatctgtgatacagttatgtgaatattttgttactgacttgtttcaatggttacttgtataaggattttatatatatgatactatagataaaatcctatttaagacaaattctgttaatcaacaagggctctgtatttttttaagttaaaatattttcatttctcagtaagtagtcagttataatagtgatttatttatgaagaataaactactatagaaagtactttgtgggaacctttattactgtgaaggagaaaaatagctatttcttgacagttctatagttatacacataaattttcaaaataaagaataccatactacacaatgatctctgattttgctgagggaaggaattatatatgtgccactttttcctcaaatttcagatgccagttttcactttttgaagcattgcatctttttaataaatctatcctgaaagctatataatatatataatttatatcaatgaatttacaataactatcaaattggctatcagaattcactgtaatggaattttgcctctaataacataaagggggaagaaacataaagtggttctcttaataaaactagcagaaaatgttgctttatggcatgtttttgtatcaaagagaaatcagaggttaaactttgcttttatcatgaaaagggcctgatttgaaggtagagataggcttagatgagaaaaattgataacgcaatgttaatactattgatatttcataggtatattttgttagaaattggttttttggtgctaatctataggcacaatagtgaatatgaatgaagagtaggtgctgcaagttaatcctacattgtgccagtgtatattagtaccatgtaaatgaatatgaataaatgaacatgaggattaacgaactgttgaaaataggctgagatactagttttctttcttttttagagggggcatgatattaaagatagttttaagtaacaaattacttattacaaagttacaacatgtggaatcaatagttttatttgttcattaatttattcattcagcaaacatttgttgaacatttaatgtgtaccagatattgccaggatcaggaaataaagaactaaaaatggacattcagactgcaattgctagtacaggggtcaaacaaaatcagtgattagaatttagtgcgttaagttccctgatgccttcacagccagaagaggctgtgaagggataaacacttctgagagtgggtggtagtagaactgagtattcaagactgaatgttaggcaggtagacagtgactggttaggctgagaaacttacaagtattttcgttgagttctgcttccactattatttactttacaatggatatgaagttcagatttcatcttatttactgaaggtggagaaaggatgtggaagtaggggttatgggctctcaaaagtagatttagagagatttttttatcactgttttatgatatagttcactgagcacttacatagattaacagttacaagtttccataaatcagttagaatatgactagcttcagggaaggaattttcaacaactgcaatctttgattgttttactgtgggaacttgcagtgatataattgacaacattatttaacaataataggtaaagtaggccgggtgtggtggctcacgcctgtaatcctagcactttgggaggccgaggtgggtggatcacaaggtcaggagttcgagaccagcctggccaatatggtgaaaccccgtctcttctaaaaaaatacaaaaattagccgggtatggtggcgcatgcctgtagtcccagctactggggaggctgaggcaagagaattgcttgaactcgggaggcggaggtcgcagtgagccgagatcgtgccactgcactccagcctgggtgacagagtgagactttgtctcaaagaaaaaaaaacaataataggtaaagtatttaaggaattctcagatgccttatggacctcttcaaaaatgtggttagccaattgattcaacttttataggtttatatgctctcatgtaaacctatttgtttccgagatcagacgagatcgggcgcgttcagggtggtatggccgtagacaacctatttgttaaaaacccttggaaacacatcttttagtagaggttcttatttacttataaagattaataatcaaattactacaattaatatccatttagccttttcagtagtctaaatatttggtaactccctagccatctataacactagttcaaaacaaggctaattcataacctgtcttaaaaatgtttgaagtggtatcaagagcattgtttatgcatgttgtgatactatttgtggaactgtttaatgagctatttcaaactgctagaagaaaatgaaataaaaatggaaaaatactgtcaaa

SEQ ID NO: 352 - DNA, 824 bp, Homo sapiens
gattattttctcaggtgtttgcaacagtgttctaactattaacgctacgatgcctgaacctaccaagtctgctcctgccccaaagaagggctccaagaaggcggtgactaaggctcagaagaaggacgggaagaagcgcaagcgcagccgcaaggagagctattcagtgtatgtgtacaaggtgctgaagcaggtccatcccgacaccggcatctcttccaaggcaatggggatcatgaattccttcgtcaacgacatcttcgagcgcatcgcaggcgaggcttcccgcctggcgcattacaacaagcgctcgaccatcacctccagggagatccagacggccgtgcgcctgctgcttccgggggagctggccaagcacgccgtgtcggagggcaccaaggccgtcaccaagtacaccagttccaagtaactttgccaagggagagacatgaagacagaggagaaatgaatgcataaaataactgataatatgaatctatacatagaacttaggaagtctcatctgcctgaaaatgactgtgtggatcccacccaaatccaactcatcctggtttgctgcacactggttcatcaaaagaaggttaccgaggggaaggaactaaaggtgtttgcacttcatgttactttttgagtttataaacataaaaacagaatttacttctgttacagacctagttactgggaattcattacttgccatggactacctttgctaagaaaagtctgaatgagaagatggcaggacgtctgaaaaaaaaagttataattaataaaatctgcggagaattgtaaaaaaaaaaaaa

SEQ ID NO: 353 - DNA, 6061 bp, Homo sapiens
ctctctccctctccctcgagctcccggctggctgcggctccctggcgctctccctctctctccggtaggctcaccgagcgatgcgagctctgggagacagcgacgccgcctcccgctagagacctgcccctcggcccggccccctgcccaaccctgcccagcgcgcgggggtcggcgaaggcgccgcggacgcaccgacggctgaagagcggcgatgcacatgcactagcagcaccccctaactcactccctccacatcccgcgccgccgccgccgcctcctccacctcctcctccgccgccgccgcctcctcctcctccggcagccgcggcagcaggacccaccctgccccccaccccaccctctgtcggctccggctgcggctccagcctcgactattattttatttattttgggtcgtgcacaagcctcagtgcctgcagtccgcgcctcctcggcccgcgggcgcctcctcccttggctccggagccccagaccccggccaccctcgattcgacaaccccagacccctgccagctgccgcgagtctccgctgctggaatcttgttagcggctgtctttttggagggttctggtttcccgacatttttgtttccagcccaggagaggatatcgtgattttccccccttgagcccaggctctgctctctgggggggtggggggcgctccaagccggggagccgtgccagccgagtcgtgcgggctgtggcagggaaggggccaccatgggatgtactctgagcgcagaggagagagccgccctcgagcggagcaaggcgattgagaaaaacctcaaagaggatggcatcagcgccgccaaagacgtgaaattactcctgctcggggctggagaatcaggaaaaagcaccattgtgaagcagatgaagatcatccatgaagatggcttctccggagaagacgtgaaacagtacaagcctgttgtctacagcaacactatccagtccctggcagccatcgtccgggccatggacactttgggcatcgaatatggtgataaggagagaaaggctgacgccaagatggtgtgtgatgtggtgagtcggatggaagacaccgagcccttctctgcagagctgctttctgccatgatgcggctctggggcgactcaggaatccaagagtgcttcaaccggtcccgggagtatcagctcaacgactctgccaaatactacctggacagcctggatcggattggggccgccgactaccagcccaccgagcaggacatcctccgaaccagggtcaaaaccactggcatcgtagaaacccacttcacattcaagaacctccacttcaggctgtttgacgtcggaggccagcgatctgaacgcaagaagtggatccattgcttcgaggacgtcacggccatcattttctgtgtcgcgctcagcggctatgaccaggtgctccacgaagacgaaaccacgaaccgcatgcacgaatccctgaagctttttgacagcatctgcaacaacaaatggttcacagacacgtccatcatcctgtttcttaacaagaaggacatatttgaagagaagatcaagaagtccccgctcaccatctgctttcctgaatatacaggccccagcgccttcacagaagccgtggcttacatccaggcccagtacgagagcaagaacaagtcagcccacaaagagatctacacccacgtcacctgcgccacggacaccaacaacatccagtttgtctttgatgctgtgacggacgtcatcatcgccaaaaacctgcggggctgtggactctactgagcccagccgccctgcccggcacccttgccctgcctggcctgccgccccccctcccctggaaccaggctccaccactctcagaccactctttgcacttgaggaagaagacctcagaggctggcaccaagggagggaggagggagcatcctccacccgcaccccccaacagaacttgtggtaacgcaggggcggggcggggctgctgagtgcatgctgcaaggccaggagactccacgctcacagcctctgtgtcatctctgagtgcttgatcgggaagctggggggacagggcagggcccagatgggcacaccctgcacctgatgactcactggaagcctcggagtgtcctcctgtcatcttgggtggtgcaggggcgcagatggccctgcagcagggtgctggcagggtggggtcataggagccatccttcagctttgcctggggtctctggtggagggcagttccgtcaacaaaagccagggtgggatcaggccaacttggtgtgggttggaggactcaggccttggcgatggcctccgtctccctgctccctcccctgggtctcagcccttccttctctgggtcatcctcccttgcctttgctctcccagagaactcccatccctgactcctccgagttctggaaatgcttcttgagactgatttatggctcagatagatggtggcgtggagcggggggagggagagatgggaggtgcggggaagggaggtggaagctcctgtgtcacctgggctggggcctcccgcccagtcctcgcaggccaaagggtgacccatttcttttttccagtcaccaggagctcggatggtcactctgaggtgtgaatagatatgtttttccttcagtccacactgaattcaactcaaaccagcaaaggcctttgggctggggattctgtggttgcagaggtctagagggggtggacttttgcagccagtgcctccgcctcaccgtcttggtgaagaaatcagcgagtttgttcacagccgttggtgtcttcccagcccctggggacagaggacagcagggggatggagctgacaccctggagtatttggacccaggccagcacaaacacacccccctgtccccaactctaaagggagagtcctaggactccttagaggaggcttcactgcggagatccctgagcagaagggggcggggtagcttctcccggtgacggtgacgcaggtctggctggccttgggcaaccaacacacctctcccactccaagatgcctccaggtggctgaggccaacgcccacacccaggccagtcgtgtgcttgtacagcaggctgtgcctggggacctagatgtgccatgggagggaggagggtacccactgacaggcctctgcctccctcctcaagccctctgttctccctgcccccactctggacactgcttagtccccagccaggcagggcccctgggtttccacttgcagcccccggactgccccagagccgggaagcaccagtgccaacagctctggacttgttggacccacaggcacagagctctgagtggtgcccaggagacccaggaaccttccctagtgccaaatgcctgcagggaccggtgcctggggagcctctggcagccggactgcaggagccaccccatcagcccaagtccacctctgttttgttcacctcggtcatgttttggaccttgcaccaggtgctgggacgtggcagaggacaggccctgggaaccaacagtgtcctaccatggacagccagggccagctaagctaagccatcccgcccaacacagaagacatggcagttatttctcagcagcaccacgctgggtgaggccagttgttccgcttactctgctccgaactgtaaccccaggctcagaagcagccggcaaaagggggatgctggccacgccccacctctaaggccatcaccctggaggtggaagtcactgggctggagggctctccatgtcccccagcagccgccctcagaacacagtggccagagcaccaggctgggtccaggcctccaatccaggccttccctgtccctagaactggggctggaggagtgggtgctcagcccttcctgccctccatccccagcctgcctttctcttcctttggatgctccatcctccttggtttcttgcactgctctcaatcctcccaccctagcctgggggtggtccttggtcctcaggggtatccggggagaaattctctccctgtgcatgacacctgtcatccatgtcgtaaccagcggctccatcttgtggggtggtgactgagggtgacaaatgagatttggctccgtcgtggatgtggatgtgggaggaatgttgcgagtgacacgtgtgggtttctaatccacagtggtcctgcgtgtgccctgaggggccatggtaacctctccgatggctcggatttagcaggccaagcagaaactgatttctacgaagagcgtctttgccaaactcatgaaaattgtgcctgccactttcatgcctatgggccagttttgtgacctgcgccgctgaccatcctaagaaccaggtcttggccttccctctgagcactgatagaggtccccaaggctctctggcctgaggagggtgtggggtctgcccagccccaagcagagagcacagtctgggcccctgaccaacagctttggcattctgggttccatggggaccctagagctcaggcacaagaacaacaccatacctgctgccaggacgcagctgtctcccaggccctccccacagcccagctcccactggcaggaactggacacatccctgccctccatggtctgcactggtcttctctgagtattcttaggagcagaggcagccccaagttccaacttgcaagccctgtaactaagctgtctataaaccccagcagggaaggccaagggatggtctcacccatgcccttccctttggccaacatgagtcctgcagtggggagcttagcccctgctcccacctaacactctacagttagcacccaggggttgattcaggaagttcttcctttttctagcctgcatccttcctggccaccccctttatttctcagtctgacctggtgcactcttggcaagtgagtccattgcagtcccaggtggatatttaatgagcactcggactgtttcctccaagtcagctagtggcctgccctcctccttttcaagaagtctggggcacagagcctcctctggctgcctcttctcttctctgagcctctgggagccttcaggcaaaacctggcagttctcaggaacccagacctgaggctccagctccgcggccaccagagattcagtgtgcagtgccgaaggcagtcacccccaggcagttcctgctgtcaggccgcaagcctagagcgcaggatcccagcagcccagggaacagggccggcgtgtgagctgctgccgtggggtctgtggtagggctccccatctcccacccctcagcaagaagagtcctgacccctgaccccaccctgcccagagaggagctggggcctccagacagaccccactgcagccagatgaaggcccctgtcaaagaaggggcaggctgggggaaaagcagaaagaatggcccccagtccaaactcctggatcccctccatgagagaggggctccccctggaacagaagctctcatccccaggcccagtgcacaagaccaccagcagagacccaccgcccttcctggcagagcaccacttcctggcagtgcagctccgaggcaccactactgtcctccccttccctccccacccctcccctccctttccctcctctcccctcccctccacacctgccctgttactcccacagctctgggcagccaggccctcccctcctgcctcctggtcttctctactccgctggttctgacccatcccctggctctgcccgccgtcccccaccctgcccctgctgagtatcttcttcctccccacgcacccccctcccccatctaggcgaggtgggctcgggcgtcccaggccctccttagaaaagccgtctctctcgagtgcagtggtcccacctcccaaccccatcactgctgcccaccccatattaactgtaattttgtaagaagagtgacttgttggtttaataaatctctagttattgtaataatttattggctgccataatgtatttattagtcgcctaccgttaataaaaagtgcccgctttccta

SEQ ID NO: 354 - DNA, 2277 bp, Homo sapiens
gctggagtttgaagagcgggcagtggctgcacacgccaaactttccctatggcttcggtgaccagggccgtgtttggagagctgccctcgggaggagggacagtggagaagttccagctgcagtcagacctcttgagagtggacatcatctcctggggctgcacgatcacagccctagaggtcaaagacaggcaggggagagcctcggacgtggtgcttggcttcgccgagttggaaggatacctccaaaagcagccatactttggagcagttattgggagggtggccaaccgaatcgccaaaggaaccttcaaggtggatgggaaggagtatcacctggccattaacaaggaacccaacagtctgcatggaggagtcagagggtttgataaagtgctctggacccctcgggtgctgtcaaatggcgtccagttctcgcgcatcagtccagatggtgaagaaggctaccccggagagttaaaagtctgggtgacatacaccctggatggcggagagctcatagtcaactacagagcacaagccagtcaggccacaccagtcaacctgaccaaccattcttacttcaacctggcaggccaggcttccccaaatataaatgaccatgaagtcaccatagaagcggatacttatttgcctgtggatgaaaccctgattcctacaggagaagttgccccagtgcaaggcactgcattcgacctgagaaagccagtggagcttggaaaacacctgcaggacttccatctcaatggttttgaccacaatttctgtctgaagggatctaaagaaaagcatttttgtgcaagggtgcatcatgctgcaagcgggcgggtactagaagtatacaccacccagcccggggtccagttttacacgggcaacttcctggatggcacattaaagggcaagaatggagctgtctatcccaagcactccggtttctgcctggagactcagaactggcctgatgcagtcaatcagccccgcttccctcctgtgctgctgaggcctggtgaggagtatgaccacaccacctggttcaagttttctgtggcttaaggaagtgtgaagatatgatccagtccagggctaggctcagccacctgtctcctgtccagaaaaaaggtgaagattaagaagctttcagaatgattctatggattaaaatcatacaaatggtggctgttctgagaatcagtctgggtattgatttccttttccagtgactggctccaggccatgtctaatgaccagctcgattccctgtgcagttcagagggcaagtgaacccaaccaacaatgtcgtcatctaagccctgaccctagccagggactcccatgctgctgttggctccatctctccacactgcctctttcttttcaactttttgcccttcctttctttaaagctattctcacattgcttttatttcctcctccttcacctccaaccactgtcagcagcactctggagttttcaaatgtcacattagcctcaccctgcatgctaggagatggacctgtctctatacagcagtagatgattgataagtgaggaaactgaggcttacagaggttgaagaccaacaagctaataaataaaaagttgaggccgggcacggtggctcacgcctgtaatcccagcactttggaaggccgaggcaggcggatcacgaggtcaggagatcgagaccatcctggctaacacggtgaaaccccgtctctacataaaaaattagctgggtgtggtagcacgcacctgtagtcccagctacttgggaggctgaagcaggagaatcgcttgaacctgggaggtggaggttgcagtgagccgagatcatgccactgcactgggcaacagagcaaaactcgatctcaaaaaaaaaaaaaaaaaaaaggaaaaaaaagcagctctctctctcgggagagggaggggacttccgagaggaaaaggcctgcaagagcctttgggttaactgagaaagcacagcccggccaacgcttgggaagaaagacaggcaagcactggaaacaggagctattagggtgaggagagagccttgcctttcacagcacagtgaggatgacattgcaccagggacagagattgtatgtgacaaggctggggctccttctttcctagacaatcaaagtatcagtgatgggttttggttggtgattttgaaaaaaaaaaaaaaaagtatgttatactagtgtatgctgtactgaattgaaataaaaccaaaatctgcatcttca

SEQ ID NO: 355 - DNA, 1286 bp, Homo sapiens
agaagaagtgaagtcaagatgaagaaccatttgcttttctggggagtcctggcggtttttattaaggctgttcatgtgaaagcccaagaagatgaaaggattgttcttgttgacaacaaatgtaagtgtgcccggattacttccaggatcatccgttcttccgaagatcctaatgaggacattgtggagagaaacatccgaattattgttcctctgaacaacagggagaatatctctgatcccacctcaccattgagaaccagatttgtgtaccatttgtctgacctctgtaaaaaatgtgatcctacagaagtggagctggataatcagatagttactgctacccagagcaatatctgtgatgaagacagtgctacagagacctgctacacttatgacagaaacaagtgctacacagctgtggtcccactcgtatatggtggtgagaccaaaatggtggaaacagccttaaccccagatgcctgctatcctgactaatttaagtcattgctgactgcatagctctttttcttgagaggctctccattttgattcagaaagttagcatatttattaccaatgaatttgaaaccagggcttttttttttttttgggtgatgtaaaaccaactccctgccaccaaaataattaaaatagtcacattgttatctttattaggtaatcacttcttaattatatgttcatactctaagtatcaaaatcttccaattatcatgctcacctgaaagaggtatgctctcttaggaatacagtttctagcattaaacaaataaacaaggggagaaaataaaactcaaggactgaaaatcaggaggtgtaataaaatgttcctcgcattcccccccgcttttttttttttttttgactttgccttggagagccagagcttccgcattttctttactattctttttaaaaaaagtttcactgtgtagagaacatatatgcataaacataggtcaattatatgtctccattagaaaaataataattggaaaacatgttctagaactagttacaaaaataatttaaggtgaaatctctaatatttataaaagtagcaaaataaatgcataattaaaatatatttggacataacagacttggaagcagatgatacagacttctttttttcataatcaggttagtgtaagaaattgccatttgaaacaatccattttgtaactgaaccttatgaaatatatgtatttcatggtacgtattctctagcacagtctgagcaattaaatagattcataagcata

SEQ ID NO: 356 - DNA, 2307 bp, Homo sapiens
gtccaccatgggtgaattatgaatcagtagctatgccaggcctcagctgggccacatctggagaactggggtgagggcacaacatcacaaaatatctggccccagtctggtcactcatcccttttagggcaacaaggaaactatcctgtggcctgagagcacaatacctgagacaaaggccagcagaaacatttgtctgccctcaccctttctgccccagcttccacctgctccccatctgcccacccactaaagcccatgtggcatgccatctctcgaacatccaggatgtcccagagtggatgtccatcaggtctgctggcagacaaaaatatctcttcaagtgccactcgagtgatagtgaagactgcaggcaaccagaaagactttatggtagctgatgacatctcggtaaggcagttcaaggagatgctattggctcacttccaatgccagatggaccaactagtgctggtcttcatgggttgccttctcaaagaccatgacacactgagccagaggggcatcatggatggccacaccatctacttggtcatcaagtccaagcagggctccagatctctagcccattccttccgggacctgccaacgaatgatccctgccaccgggacagaaacaccaaaggaaacagcagcagagtgcaccaaccaactggtatgaatcaagctccagtggaactggcccactttgtggggtctgatgcacccaaagtgcatacccaaaacttggaagtgagccacccagagtgcaaagcacagatgctggagaatcctagcatccagcggcttctgtccaacatggagttcatgtggcagttcatttcagaacatctagacacgcaacaattgatgcagcagaacccagaagtttcccgccttcttcttgataattctgagatcctattgcagactctggagctggccaggaaccttgctatgatccaagagataatgcagatccaacaaccttcacaaaaccttgagtatccactgaacccacagccatatctgggcttagagacaatgccaggtgggaataatgccctgggtcagaactatgctgatatcaatgatcaaatgctgaacagcatgcaagatccttttggaggaaaccctttcacagctctcctggcaggacaagtgctagaacaagtccagtcttcacccccacctccaccaccatcacaggaacaacaagaccagctcacacagcatcctgcaacccgagtcatctataatagctctggtggtttctcttcaaacacctcagccaatgacacccttaacaaggtcaaccacacttccaaagccaacactgctatgatttccaccaagggccagagccatatctgtgccactcggcagccagcttggataccagccttacctagcatagagcttacccagcagcttcaagaagaatacaaggatgccactgtttctctaagtagctccagacagacattaaagggtgatctccagctgtcagatgagcagagcagctcccagatcacaggaggcatgatgcagttgcttatgaacaacccctacctggcagctcagattatgttgttcacaagtatgccccagctgagtgaacagtggaggcagcagctgcccacattcctgcagcagacacagatttctgatctgcttagtgcttaggcaaccctaaagcattccaagcaatattgcagattgagcaggccctccagctgctggccacagaggctcctgttcttctgccttgggttgcaccctacctatggggcctgggttggcttcctgcccccagctgcagctatcctgacacagtgccctgttcctggaatgtttcagatacagctgagcccaagggacctgagtgctgccacaagcctggaacagtcctgcagaggctacaatccccggatggggacccttcccaccctctgcaagctcctgagatttgttttagcaaacagatggattctctccaggccatgggatttgggaaccaccatgccaatctacaggcactcattgctactgaaggggacaccaatgctgctatccgcaagctcaagagatcccagagattctaaccaccatgcctacttgtttgcttgctacctgcctgctgacccacctgaccatctcatttgccttttgcacctttcctgatgcttccagccaggagaagtcctggaataagagttatcaaccaatgtgtcttgtactgaataatagatcattggtcgtggctgaaacatctgtcaataaaatggctacactcacttgctgcga

SEQ ID NO: 357 - DNA, 2696 bp, Homo sapiens
atcagacagtaaaacaggggcagagcctggaattgcactgaggcttgagtctgacttctctcccccacctgctgtgcccttaaactgcagagatcggggcgggggttggggggcaagcggctcagatgggttcaaaaaactccccaggctcaactctggttctgactgcctgagacatgggcagctgacacagcagaccttgaatcctgaggatgtgaggcagggtatatctgggaggccggaggacgtgtctggttattacacagatgcacagctggacgtgggatccacacagctcagaacagttggatcttgctcagtctctgtcagaggaagatcccttggacaagaggaccctgccttggtgtgagagtgagggaagaggaagctggaacgagggttaaggaaaaccttccagtctggacagtgactggagagctccaaggaaagcccctcggtaacccagccgctggcaccatgaacccagagagcagtatctttattgaggattaccttaagtatttccaggaccaagtgagcagagagaatctgctacaactgctgactgatgatgaagcctggaatggattcgtggctgctgctgaactgcccagggatgaggcagatgagctccgtaaagctctgaacaagcttgcaagtcacatggtcatgaaggacaaaaaccgccacgataaagaccagcagcacaggcagtggtttttgaaagagtttcctcggttgaaaagggagcttgaggatcacataaggaagctccgtgcccttgcagaggaggttgagcaggtccacagaggcaccaccattgccaatgtggtgtccaactctgttggcactacctctggcatcctgaccctcctcggcctgggtctggcacccttcacagaaggaatcagttttgtgctcttggacactggcatgggtctgggagcagcagctgctgtggctgggattacctgcagtgtggtagaactagtaaacaaattgcgggcacgagcccaagcccgcaacttggaccaaagcggcaccaatgtagcaaaggtgatgaaggagtttgtgggtgggaacacacccaatgttcttaccttagttgacaattggtaccaagtcacacaagggattgggaggaacatccgtgccatcagacgagccagagccaaccctcagttaggagcgtatgccccacccccgcatgtcattgggcgaatctcagctgaaggcggtgaacaggttgagagggttgttgaaggccccgcccaggcaatgagcagaggaaccatgatcgtgggtgcagccactggaggcatcttgcttctgctggatgtggtcagccttgcatatgagtcaaagcacttgcttgagggggcaaagtcagagtcagctgaggagctgaagaagcgggctcaggagctggaggggaagctcaactttctcaccaagatccatgagatgctgcagccaggccaagaccaatgaccccagagcagtgcagccaccagggcagaaatgccgggcacaggccaggacaaaatgcagacttttttttttttttttttttttttttgagatggagtctcgctctatcgcccaggatggagtgcagtggctcaatctcggctcactgcaaactccgcctcccgggttcacaccattctccggcctcagtctcccgagtagctgggactacaggcacctgccaccacgcccggctaatttttttgtattttcactggagacggggtttcactgtgttagccacgatggtctccatctcctgacctcgtgatctgcccacctcggcctcccaaagtgctgggattacaggcgtgagccaccgcgcctggccaaaatgcagacattttattagggggataaggagggcaaggtaaagcttatggaactgagtgttagtgactttggcatttgtgtagctgagcacagcaagggaggggttaatgcagatggcaagtgcaccaaggagaaggcaggaacactggagcctgcaataagggaggagagaggactggagagtgtggggaatgggaagaagtagtttactttggactaaagaatatattgggcgaagaatagagggggagcttgcaggaaccagcaatgagaaggccaggaaaagaaagagctgaaaatggagaaaaccagagttagaactgttggatacaggagaagaaacagcagctccactaccgacccccccccaggtttgatgtccttccaagaataaagtctttccctggtgatggtctctcgctctgtctttccagcatccactctcccttgtccttctgggggtgtatcacagtcagccagtggcttcttcatgatggtggttggggtggttgtcatgtgacgggtcccctccaggttactaaagggtgcatgtcccctgcttgaaccctgagaggcaggtggtaggccatggccacaatccccagctgaggagcaggtgtccctgagaacccaaacttcccagagagtatctgagaaccaaccaatgaaaacagtcccatcgctcttagccggtaagtaaacagtcagaagattagcatgaaagcagtttagcattgggaggaagcacagatctctagagctgtcctgtcgctgcccaggattgacctgtgtgtaagtcccaataaactcacctactcaccaaaaaaaaaaaa

SEQ ID NO: 358 - DNA, 1044 bp, Homo sapiens
gaccaaagaggctgggccccgccatgggccagacggcaggcgaccttggctggcggctcagcctgttgctgcttcccttgctcctggttcaagctggtgtctggggattcccaaggcccccagggaggccccagctgagcctgcaggagctgcggagggagttcacagtcagcctgcatctcgccaggaagctgctctccgaggttcggggccaggcccaccgctttgcggaatctcacctgccaggagtgaacctgtacctcctgcccctgggagagcagctccctgatgtttccctgaccttccaggcctggcgccgcctctctgacccggagcgtctctgcttcatctccaccacgcttcagcccttccatgccctgctgggagggctggggacccagggccgctggaccaacatggagaggatgcagctgtgggccatgaggctggacctccgcgatctgcagcggcacctccgcttccaggtgctggctgcaggattcaacctcccggaggaggaggaggaggaagaggaggaggaggaggaggagaggaaggggctgctcccaggggcactgggcagcgccttacagggcccggcccaggtgtcctggccccagctcctctccacctaccgcctgctgcactccttggagctcgtcttatctcgggccgtgcgggagttgctgctgctgtccaaggctgggcactcagtctggcccttggggttcccaacattgagcccccagccctgatcggtggcttcttagccccctgccccccaccctttagaactttaggactggagtcttggcatcagggcagccttcgcatcatcagccttggacaagggagggctcttccagccccctgccccaggctctacccagtaactgaaagcccctctggtcctcgccagctatttatttcttggatatttatttattgtttagggagatgatggtttatttattgtcttggggcccgatggtcctcctcgggccaagcccccatgctgggtgcccaataaagcactctcatcca

SEQ ID NO: 359 - DNA, 1358 bp, Homo sapiens
gttggtgaagatcttaacaccacgccttgagcaagtcgcaagagcgggaggacacagaccaggaaccgagaagggacaagcacatggaagccagcccagcatccgggcccagacacttgatggatccacacatattcacttccaactttaacaatggcattggaaggcataagacctacctgtgctacgaagtggagcgcctggacaatggcacctcggtcaagatggaccagcacaggggctttctacacaaccaggctaagaatcttctctgtggcttttacggccgccatgcggagctgcgcttcttggacctggttccttctttgcagttggacccggcccagatctacagggtcacttggttcatctcctggagcccctgcttctcctggggctgtgccggggaagtgcgtgcgttccttcaggagaacacacacgtgagactgcgtatcttcgctgcccgcatctatgattacgaccccctatataaggaggcactgcaaatgctgcgggatgctggggcccaagtctccatcatgacctacgatgaatttaagcactgctgggacacctttgtggaccaccagggatgtcccttccagccctgggatggactagatgagcacagccaagccctgagtgggaggctgcgggccattctccagaatcagggaaactgaaggatgggcctcagtctctaaggaaggcagagacctgggttgagcagcagaataaaagatcttcttccaagaaatgcaaacagaccgttcaccaccatctccagctgctcacagacgccagcaaagcagtatgctcccgatcaagtagatttttaaaaaatcagagtgggccgggcgcggtggctcacgcctgtaatcccagcactttggaggccaaggcgggtggatcacgaggtcaggagatcgagaccatcctggctaacacggtgaaaccctgtctctactaaaaatacaaaaaattagccaggcgtggtggcgggcgcctgtagtcccagctactctggaggctgaggcaggagagtagcgtgaacccgggaggcagagcttgcggtgagccgagattgcgctactgcactccagcctgggcgacagtaccagactccatctcaaaaaaaaaaaaaccagactgaattaattttaactgaaaatttctcttatgttccaagtacacaatagtaagattatgctcaatattctcagaataattttcaatgtattaatgaaatgaaatgataatttggcttcatatctagactaacacaaaattaagaatcttccataattgcttttgctcagtaactgtgtcatgaattgcaagagtttccacaaacacta

SEQ ID NO: 360 - DNA, 4269 bp, Homo sapiens
gttttgttcctcccactccagacactggacgctcctagcaaccggctagcagctcggtttccaaggactgtaacgccttcaaccgcccgccgcgatagagtgcccacgaccctgcctcgggaatcccgctctgcaccgccccaccagacccggactcggagccgcgagcggcccgagatgagcagcaatgactcctcccttatggctgggatcatttactatagccaggaaaagtacttccaccatgtgcagcaggctgcagctgtgggcctggaaaaattcagcaatgaccctgtgttgaagttctttaaagcctatggagtcctcaaagaagagcacatccaggatgccatcagtgacctggaaagcatcaggcatcacccagacgtgtccctgtgctccaccatggccctcatttatgctcacaaaagatgtgaaatcattgaccgagaagcaattcaggagcttgagtacagcctgaaggaaatacgcaagacagtcagtgggactgcactgtactatgctggccttttcctctggctcataggccgccatgacaaggccaaagagtacattgaccgcatgctgaagatttctagaggcttcagagaggcctatgtgctcagaggctgggtggacctgacctcagacaagccccacactgcgaagaaagccattgagtacctggaacaaggaattcaggacaccaaagatgtgctggggctgatgggaaaggcaatgtacttcatgatgcagcagaactactcagaggccctggaggtggtgaaccagatcactgtgacttcagggagcttcctgccagccctcgtcctgaagatgcagctgttcttagctcggcaggactgggagcagacagtagaaatgggacacagaatcctagaaaaagatgagagcaatattgatgcctgccaaattctaaccgtgcatgagcttgcaagagaaggaaacatgaccacagtaagttctttgaagactcagaaggctaccaatcacgttagaaatctgattaaggcactagagacaagggaacccgaaaatccaagcctccatcttaaaaaaattattgtggttagccgactgtgtgggagtcaccaggtgattctagggctagtgtgtagtttcatcgagcgcaccttcatggccaccccctcgtatgtccatgtggccacagaactgggctatctcttcatcctgaagaaccaagtgaaagaggccttgctgtggtattcagaagccatgaaactggacaaggatggcatggctggtttgacagggatcatcttgtgtcatatcttagaaggccacctggaggaagctgagtaccggctggaattcctgaaggaggtgcagaagtcccttgggaagtctgaggtgctaattttcctccaagccctcctgatgtccaggaagcacaagggggaggaagagaccacagcgctcctgaaggaggcagtggagcttcacttctccagcatgcaaggcatccctcttggctctgagtactttgaaaagctggacccgtacttcctggtctgcattgctaaggagtacttgctcttctgccccaagcagcccaggttaccaggccagatcgtgtctccacttcttaaacaagtcgccgtgatcttgaatcctgtagtcaaagcagcaccagctctgatcgaccccctgtatttgatggctcaggtcaggtattactcagagctagagaatgcccagagcatcctgcagcgttgcctggagctggaccccgcctccgtggatgcccatctcctcatgtgtcagatctacttggctcagggcaactttggcatgtgcttccactgcttagagctgggtgtcagccacaacttccaggtccgagatcaccccctctaccacctcatcaaggccagggccctcaacaaggctggagactatccagaggccataaagacgctgaaaatggtcatcaaattgccagctctgaagaaggaagaaggcagaaagttcctcaggccctctgtgcagcctagccagcgggcatccatcttattggaactggtggaggccctccggctgaatggggagctacatgaggccaccaaggtcatgcaggacaccatcaatgagttcggtggcacaccagaagagaaccgcatcaccattgccaacgtggacttggtcctgagcaagggcaatgtggacgtggcgctgaacatgctaaggaacatcttgcccaagcagtcctgctatatggaagccagagagaagatggccaacatctacctgcagaccctcagagacaggcgcctctacatcagatgctaccgtgagctctgtgaacatctgcctggcccccacaccagcctgctactgggcgatgccttaatgagcattctggagcccgagaaggccctggaggtctatgatgaggcctatagacagaacccacatgacgcctccctggccagcagaattgggcacgcttatgtgaaggcccaccagtatactgaggcaattgagtattatgaggctgcccagaagattaatggacaggactttctgtgctgcgatctgggcaaactgctcctgaagttaaagaaggtcaataaagcagaaaaagttttgaagcaggcactggaacatgacattgtccaagacatcccatccatgatgaatgatgttaagtgcctgcttttgctggcaaaggtttacaagagccataaaaaagaagctgtgatagaaactttgaacaaggccttggacctccagtctcggatactgaagcgagttccactggagcaaccagaaatgattccctcccagaagcaactggcagcctctatctgcatccaatttgcagagcactacctggcagagaaagagtatgacaaggcggtacagtcttataaggatgtcttctcctacttgccaactgacaataaggtgatgctggagctggcgcagctctacctgctccaggggcacctggacctgtgtgagcagcactgtgccatcctcctgcagactgagcagaaccatgagaccgcttctgtgttgatggctgacctgatgtttagaaaacagaaacatgaagcggccatcaatctttaccaccaagtcttggagaaagcgccagacaattttttggtattgcataaattaatcgatctgctaagaagaagtggaaaacttgaagacattcctgccttctttgaattggccaagaaggtgtctagccgggtgcctttggaaccagggttcaattactgcagaggtatctactgctggcacatagggcagcccaacgaagccttaaagttcctgaacaaggcacgcaaggacagcacttggggccagagcgccatctaccacatggtgcagatctgtctgaatccagacaacgaggttgtgggcggagaggcttttgagaaccagggagctgagagcaactacatggagaagaaggagttggagcagcagggtgtgagcaccgccgagaaactgctgcgtgagttttacccacattcagactccagccagacccagctgcggctgctgcagggcctctgccggctggccaccagggagaaggctaacatggaggctgcgctgggcagcttcatccagatagcgcaggctgagaaggacagcgtccctgccctgctggccttggcacaagcctacgtgttcctgaagcagatccccaaggcgcgtatgcagttgaagcgcctggccaagaccccctgggtgctgagtgaggctgaggacctggagaagagctggctcctgctggctgacatttactgccagggcagcaagttcgacctcgccttagaactgctgcggcgctgtgtgcaatacaacaagtcctgctacaaggcctatgagtacatgggcttcatcatggagaaggagcagtcctacaaggatgcagtcaccaactacaaactggcctggaagtacagtcatcacgccaaccctgccattggcttcaaacttgctttcaactacctgaaggacaagaaatttgtggaggccattgaaatctgcaacgatgtcctcagggagcaccccgactaccccaagatcagggaggaaattttggaaaaggcccgaaggtccctgaggccctagctggggtcaaggggcctggaccagtagaagccatcaacctactgaagttgtgtggagggatggaaagtgggtcagtggagaagggattcagaaaatgacacattcttccccatttaaaaaaaaaaaaaa

SEQ ID NO: 361 - DNA, 4905 bp, Homo sapiens
gcagaagtttgcagagcgctttctcgccggctggtcccggactcgcgctgcgccctgcgccctgcgccgccgcctcctccttctgccgccgccgccctgttctcccgggattccttctctgtggaggactgactctctgcttgtgggaattagaggtggacaagggggagtgccggggggtagcgacggggttctttccagtggcagctgcgagtcgggacgccgggagcgtggggctcctgctggccacggatctcggccaccttcccgcggcctccgggcaggcaatgcggccgccgagccccgcgacgcagagaggaaggagggtggcccggagggcctagagcttgtttctgcccacttgggaaagagggcatggagttgtgagtgcccctcgctcggcgacgccgccctcggcaggctccccatggccgggacgtacagctcgactctgaagacgctggaggacttgaccttggactccgggtatggggccggggactcgtgccgctcgctcagcctctcgtcctccaagtccaactcgcaggcgctcaactcttcggcgcagcagcaccgcggggcggcctggtggtgctactccggctccatgaacagccgccacaacagctgggacacggtgaacacggtgctgcccgaggaccccgaagtggccgacctcttctcgcgctgtccgcggctccccgagctggaggagttcccctggaccgaaggagacgtggcccgggtgctccgcaaaggcgctggcggccggcggctgccccagttctccgccgaggcggtgaggcgcctggccgggctgctccgcagggcactgatccgcgtggcccgcgaggcgcagcgcctgagcgtgctgcacgccaagtgcacccgctttgaggtgcagagcgccgtgcgcctggtgcacagctgggcgctggccgagagctgcgcgctggcagccgtcaaggcgctgtccctgtacagcatgagcgccggcgacgggctgcgccggggcaagtccgcgcgctgcggcctcaccttctcagtgggtcgctttttccgctggatggtggacacccgaatctccgtgcgcatccacgagtacgcagccatctccctcaccgcctgcatggagaacctggtggaggagatccgggccagggtgatggccagccacagccctgatggcggaggggccggaggcggggaggtgtctgctgaggccctggagatggtcatcaacaacgacgccgagctctggggcgtcttgcagccctatgagcatctcatctgcggcaagaacgccaatggtgtcctctccctccccgcatacttcagcccctacaacggcgggtccctgggccatgacgagcgagccgatgcctatgcccagctggagctccgaaccctggagcagtccctcctggccacctgcgtgggcagcatctcggagctgagtgacttggtctcccgtgccatgcaccacatgcaggggcgtcaccccctgtgcccgggtgccagccctgcccgccaggcccgccagccgccacagcccatcacttggtcccccgacgccctccacacgctctactactttctgcggtgtccacagatggagtccatggagaaccccaacctggaccccccgagaatgaccttgaacaatgaacggcccttcatgctgctgccgcccctcatggagtggatgcgcgtggccatcacctacgcagagcaccgccgcagcctcaccgtggacagcggcgacatccggcaggcagcccggctgctgctgcctggtctggactgtgaacctcggcagctcaaacccgaacactgtttcagttccttccggaggctggatgcccgagcagctactgaaaaattcaaccaggacctgggtttccgcatgctcaactgtgggaggacggacctcatcaaccaagccatcgaggccttgggtccggatggggttaacaccatggatgaccagggtatgacgccactgatgtacgcctgcgctgctggggacgaagcgatggtccagatgttgattgatgctggggcaaacttggacatccaggttccaagcaactcccccaggcacccttccatccaccccgacagccggcactggacctcactgacattcgctgtgctgcatggacacatctctgtggtccagttgctgctggatgctggtgcccatgtcgagggctcggcagtgaacggcggcgaggacagctatgcggagacgcccctgcagctggcctctgcggcagggaactatgagctggtcagtttgttgctgagccgaggcgccgaccccctcctcagcatgctggaggcccacggcatgggctcctccctccacgaggacatgaactgcttcagccactcagctgcccacggccacaggaacgtcctgaggaagctcctgacgcagccacagcaggctaaagcggacgtgctgtccctggaggagatcctggccgagggtgtggaggaaagtgatgcgtcgagccagggcagtggcagcgaggggcccgtgcggctgagccggacccgcaccaaggccctacaggaggccatgtactacagcgctgagcacggctacgtggacatcaccatggagctgagggcactgggagtcccctggaagctgcacatctggatcgagtctctgaggacctcgttctcgcagtcgcggtactcggtggtgcagagcctcctgcgggacttcagctccatcagagaggaggagtacaacgaggagctggtgaccgagggcttgcagctcatgttcgacatcctcaagaccagcaaaaacgactccgtcatccagcaactggctaccatcttcacccactgctatggcagcagtcccatccccagcatcccagagatccggaagaccctgccggccaggctagatccacactttttgaacaataaggagatgtcagatgtgaccttcctggtggaaggaaagctgttttatgcacataaagtcctgctggtgacagcttctaacaggttcaagacactaatgaccaataaatcagaacaggatggggacagcagcaagaccatcgagatcagcgacatgaagtaccacatttttcagatgatgatgcagtatctgtactacggaggaacagaatccatggagatccccaccactgacatcctggagctgctgtcagctgccagcctgttccagctggatgccctgcagaggcactgcgagatcctgtgctcccagaccctcagcatggagagtgccgtgaacacctacaaatatgccaagatccacaatgccccagaactggccctgttctgtgagggcttcttcctcaagcacatgaaggccctactggagcaggatgccttccggcagctcatctacggccgcagcagcaaagtgcagggcctggatccactgcaggacctgcagaacaccctggcagagcgcgtgcactctgtctacatcacctcccgggtgtgaggcagggggcggaggctgccgaggccagggcctgtggaggtgccagggcccaccatgtcggggtatggttgtaggccctcttggagccaggttcacggggctgtttcctcctcctcccccagatgtcccccctgtcaccgggcagctcaccctcatctcctctgccctagagctgtttgttcaatcactgatgggcaaaggggagatgtagctaactggtggccctcctccccatctcagtttgcaactcaagggcagccatgcactcccccggggtgtcgctctcccctcctgcaggtcagcagctgatcctgatccacctccgcccaggccctccaagctctactcacccctagggcctcagtaaactcagaccatcccaactggggctcctgggggtacaggaatccttatgaatgtatagaatgcatactgcctaggcccccagtcgtctgcagtaattcaaaagctggtatttttcttcctaaatgtcacatagcaaaggctgcccaaatccccaaacttgttcttcaaaggtttgacaggcttaatgtgggcatccagtggcctgtggacccccccctgccaccacgactgctgccacccggagttcccccattgtctttggtgcctgggcttccagagtccctcccatcaggactaccagcttgctcagttagcagcagagggcagttccccagcttgatggtttctgagctaagtctggcatggaggggcaaggggtaggggatggggtgctgtgtaggaatggcctcagctcttgttttgctgctggttttaggggccaaagtaaatgggtggattctggaacctcaggcctagactaggttgcctttgtgggggcgatgaagcagagtcccctggtcaagtctctcggctcctttaatgtaggattgagagctgggcaaacaggtcccactggggactgtgactcttggagattaaaggacagggcattgatggaaggtaagggccaggagaagaggcctttctgctgtgtcccctcacggccttgccctcgaattctgcaggccctgggctcccctgacacctgtcatatttatggaccagacactggggcagcatcaggcacagtctgtctgggtgcaacttcttcagctgtctggccgcaccttaaaaactatttattcaccaaaagccccaggcatttcagaaggtggcactcaggtcaccctgaaaagcccccaggggcttgcaattctggaaaatattttgactagctgcttggctggatgtacaaagaaataggcattattttattgctgtaatattgtatgatactttaactgtacaataatgttgtcacttactgtaaatgtactatggttttattaacaataaacactcattaacaatga

SEQ ID NO: 362 - DNA, 2541 bp, Homo sapiens
gctgctgctgctcctcctgctgtgggaccgctgaccgcgcggctgctccgctctccccgctccaagcgccgatctgggcacccgccaccagcatggacgctcgccgcgtgccgcagaaagatctcagagtaaagaagaacttaaagaaattcagatatgtgaagttgatttccatggaaacctcgtcatcctctgatgacagttgtgacagctttgcttctgataattttgcaaacacgaggctgcagtcagttcgggaaggctgtaggacccgcagccagtgcaggcactctggacctctcagggtggcgatgaagtttccagcgcggagtaccaggggagcaaccaacaaaaaagcagagtcccgccagccctcagagaattctgtgactgattccaactccgattcagaagatgaaagtggaatgaattttttggagaaaagggctttaaatataaagcaaaacaaagcaatgcttgcaaaactcatgtctgaattagaaagcttccctggctcgttccgtggaagacatcccctcccaggctccgactcacaatcaaggagaccgcgaaggcgtacattcccgggtgttgcttccaggagaaaccctgaacggagagctcgtcctcttaccaggtcaaggtcccggatcctcgggtcccttgacgctctacccatggaggaggaggaggaagaggataagtacatgttggtgagaaagaggaagaccgtggatggctacatgaatgaagatgacctgcccagaagccgtcgctccagatcatccgtgacccttccgcatataattcgcccagtggaagaaattacagaggaggagttggagaacgtctgcagcaattctcgagagaagatatataaccgttcactgggctctacttgtcatcaatgccgtcagaagactattgataccaaaacaaactgcagaaacccagactgctggggcgttcgaggccagttctgtggcccctgccttcgaaaccgttatggtgaagaggtcagggatgctctgctggatccgaactggcattgcccgccttgtcgaggaatctgcaactgcagtttctgccggcagcgagatggacggtgtgcgactggggtccttgtgtatttagccaaatatcatggctttgggaatgtgcatgcctacttgaaaagcctgaaacaggaatttgaaatgcaagcataatatctggaaaatttgctgcctgccttctacttctcaaatctttcttgtaaaagtttccaattttttcactgaaacctgagttaaaaatcttgatgatcagcctgtttcataagaaactccaatcaagttaatcttagcagacatgtgtttctggagcatcacagaaggtatattgctagttacactttgccctcctgcagtttcttctctgctcccaacccccatctcacagcatccccctctatttccaatgctcctctccaaccgcttagtttctgaatttcttttaaattacagttttatgaaagcatattttatttacttggtgttgaaatagccctcataaaacctaagcacttggaaacacaataatagtattaactaactagatctattgaatttcagagaagagccttctaacttgtttacacaaaaacgagtatgatttagcattcatactagttgaaatttttaatagaatcaaggcacaaaagtcttaaaaccatgtggaaaaattaggtaattattgcagattgatgtctctcaatcccatgtattgcgcttatgttacaagttgttgtcacagttgagacttaatttctcctaatttcttctgcccgaagggtaagtggtgcgtccagcttacacaatcataattcaaaggttggtgggcaatgtaatacttaattaaaataatgatggaagagctatctggagattatgagtaagctgatttgaattttcagtataaaactttagtataattgtagtttgcaaagtttatttcagttcacatgtaaggtattgcaaataaattcttggacaattttgtatggaaacttgatattaaaaactagtctgtggttctttgcagtttcttgtaaatttataaaccaggcacaaggttcaagtttagattttaagcacttttataacaatgataagtgcctttttggagatgtaacttttagcagtttgttaacctgacatctctgccagtctagtttctgggcaggtttcctgtgtcagtattccccctcctctttgcattaatcaaggtatttggtagaggtggaatctaagtgtttgtatgtccaatttacttgcatatgtaaaccattgctgtgccattcaatgtttgatgcataattggaccttgaatcgataagtgtaaatacagcttttgatctgtaatgcttttatacaaaagtttattttaataataaaatgtttgttctaacttgtctgcttttttaaaaataatcttactgtacttaattctaattttttcctcatatttaaataaaaggccatttccaccttttctaaaaaa

SEQ ID NO: 363 - DNA, 1509 bp, Homo sapiens
agaaccgcgacctccgcaaccttgagcggcatccgtggagtgcgcctgcgcagctacgaccgcagcaggaaagcgccgccggccaggcccagctgtggccggacagggactggaagagaggacgcggtcgagtaggttttaaaacatgaatcctacactcatccttgctgccttttgcctgggaattgcctcagctactctaacatttgatcacagtttagaggcacagtggaccaagtggaaggcgatgcacaacagattatacggcatgaatgaagaaggatggaggagagcagtgtgggagaagaacatgaagatgattgaactgcacaatcaggaatacagggaagggaaacacagcttcacaatggccatgaacgcctttggagacatgaccagtgaagaattcaggcaggtgatgaatggctttcaaaaccgtaagcccaggaaggggaaagtgttccaggaacctctgttttatgaggcccccagatctgtggattggagagagaaaggctacgtgactcctgtgaagaatcagggtcagtgtggttcttgttgggcttttagtgctactggtgctcttgaaggacagatgttccggaaaactgggaggcttatctcactgagtgagcagaatctggtagactgctctgggcctcaaggcaatgaaggctgcaatggtggcctaatggattatgctttccagtatgttcaggataatggaggcctggactctgaggaatcctatccatatgaggcaacagaagaatcctgtaagtacaatcccaagtattctgttgctaatgacaccggctttgtggacatccctaagcaggagaaggccctgatgaaggcagttgcaactgtggggcccatttctgttgctattgatgcaggtcatgagtccttcctgttctataaagaaggcatttattttgagccagactgtagcagtgaagacatggatcatggtgtgctggtggttggctacggatttgaaagcacagaatcagataacaataaatattggctggtgaagaacagctggggtgaagaatggggcatgggtggctacgtaaagatggccaaagaccggagaaaccattgtggaattgcctcagcagccagctaccccactgtgtgagctggtggacggtgatgaggaaggacttgactggggatggcgcatgcatgggaggaattcatcttcagtctaccagcccccgctgtgtcggatacacactcgaatcattgaagatccgagtgtgatttgaattctgtgatattttcacactggtaaatgttacctctattttaattactgctataaataggtttatattattgattcacttactgactttgcattttcgtttttaaaaggatgtataaatttttacctgtttaaataaaatttaatttcaaatgtagtggtggggcttctttctatttttgatgcactgaatttttgtgtaataaagaacataattgggctctaagccataa

SEQ ID NO: 364 - DNA, 4800 bp, Homo sapiens
agagcggcggccggtcccgcgcggagcccggcgcccctccagcccgagccaggacgccgccggccccggtcccggccccgggcacgcagcgagccagggatgtgagcggcgccccgcggcatggcagcctcaggggtgcccagaggatgcgacatcctcatcgtctacagcccggatgccgaggaatggtgccagtacctgcagaccctgttcctgtccagtcggcaggtccgcagccagaagatactgactcacaggctgggccccgaggcctccttctcggcagaggacctaagccttttcctcagcacccgctgtgtcgtggtgctgctgtccgcggagctggtgcagcacttccacaagcccgccttgctgcccctgctgcagagagctttccatcctccgcaccgcgtggtcaggctgctctgcggcgtgcgggacagcgaggagttcctagacttctttccagattgggcccattggcaggagctcacctgtgacgatgagccagagacctacgtggcagctgtgaaaaaagccatttccgaagattctggctgtgactcagtcactgacactgagcctgaggacgagaaggttgtttcctactcgaagcagcagaacctgccgacggtgacttcacctgggaacctgatggtggtgcagccggaccgcattcgctgtggggcagaaaccactgtctatgttattgtgagatgtaagctggatgacagggtggcgacagaagcagagttttctcctgaggattctccctctgtaaggatggaagccaaggtggagaatgagtacaccatttcagtgaaggctcccaacctttcatctgggaacgtttctctgaagatatattctggagacttagtggtgtgtgaaaccgttatcagctattatactgacatggaagaaattgggaatttattgtccaatgccgcgaatcctgtggaattcatgtgtcaggcctttaaaattgtgccctacaacacagagacccttgataaactgctaaccgaatccctgaagaacaatatccctgcaagcggactgcacctctttggaatcaaccagctggaagaagaagatatgatgacaaatcagagggatgaagagctgcccaccctgttgcattttgctgcgaagtatggactgaagaacctcactgccttgttgctcacctgcccaggagccctgcaggcgtacagcgtggccaacaagcatggccactaccccaacaccatcgctgagaaacacggcttcagggacctgcggcagttcatcgacgagtatgtggaaacggtggacatgctcaagagtcacattaaagaggaactgatgcacggggaggaggctgatgctgtgtacgagtccatggcccacctttccacagacctgcttatgaaatgctcgctcaaccccggctgtgacgaggatctctatgagtccatggctgcctttgtcccagctgccactgaagacctctatgttgaaatgcttcaggccagtacatctaacccaatccctggagatggtttctctcgggccactaaggactctatgatccgcaagtttttagaaggcaacagcatgggaatgaccaatctggagagagatcagtgccatcttggtcaggaagaagatgtttatcacacggtggatgacgatgaggccttttctgtggacctggccagcaggccccctgtcccagtgcccagaccagagaccactgctcctggtgctcaccagctgcctgacaacgaaccatacatttttaaagtttttgcagaaaaaagtcaagagcggcctgggaatttctacgtttcctcagagagcatcaggaaagggccgcccgtcagaccatggagggacaggccccagtcgagtatatatgacccttttgcgggaatgaaaacgccaggccagcggcagcttatcaccctccaggagcaggtgaagctgggcattgtcaacgtggatgaggctgtgctccacttcaaagagtggcagctcaaccagaagaaacgatcggagtcctttcgtttccagcaggaaaatcttaaacggctaagagacagcatcacccgaagacagagagagaagcaaaaatcaggaaagcagacagacttggagatcacggtcccaattcggcactcacagcacctgcctgcaaaagtggagtttggagtctatgagagtggccccaggaaaagtgtcattccccctaggacggagctgagacgaggagactggaaaacagacagcacctccagcacagcaagtagcacaagtaaccgctccagcacccggagcctcctcagtgtgagcagcgggatggaaggggacaacgaggataatgaagtccctgaggttaccagaagtcgcagtccaggccccccacaagtggatgggacacccaccatgtccctcgagagaccccccagggtgcctccgagagctgcctcacagaggcctccgaccagggagaccttccatcctcctccacctgttccacccagaggacgctgattccacctcctaaaacctgcctacttcaggactttaagactcacagtcttcagcctgttaatgatgtcttcatgttgagttttatagcatgactgttgaccttaagatccattctcattgctgataatgctgcagccctgctggtttgggcttgcctcgaagattttattaaggcacgaagaagtgaaaaactaagggcttcattcaccatcaccaagtatatcgaaccatatacttgtttgccaaaaggatgaagacttaatcgaaatacttacctctaatttgccatatcagaagcctaaaaagaatgatcataaatgtacttcaccagtgattttactgaaatgcacttatattagtctttatgtatttgctagttcagcctgatttctagaagaggttatagtgtgagacttgtagtattcaagtaagataagtgacctaattttaaaataattcttctacttttctgtatattcagcagggtatttaagtgctagggctggtcacacacaaccaactgaaaaagactagagggattagtacaaactcctcttatacagaaggcaaatctgaggttccacagaagtctggaaccaagactattcagttggttaaataaagaggttagtctagactgggcctgctcattctaggtcaccacattttccatctccaaatagccaggccctctctccctcaagaaatgcccagatgtagaaattcatcagtgcctattggtcttccagaattttccatcttccgtatctcccaggcatgagactaccaagtttgtttgttttctttccaatttgggaatttatacttcagtatggtttcaacgcagttatgtttccagagaacatctagaagtggctggaaaccagaagctggggattccagggaccccacttagtgctctatttcctttataggttttatttctggtcatagagagagaaggacctttgactttttcttcgttgaggcttctgaggaggaaaaacaaacctaaaatagaaatacagtcagcctttcaaatccatgggttctgtgtccgtggattcaaccaaccttggatcaaaaatatttgaaaaaaaatctacaaagtttcaaaaagcaaaacttgaatttgctgcatgccaagaagtatgttgaattcatgtaaatgaagtgatgtgtaggcattgtattagatattataagaaatctagaaatgatttaaagcatacaggaggatgtgcataggttatatgcaaatactatgctattttatatatgggacttgagcatttgtggattttgatactgggggatcctggaaccaatcccccatggataccaaagtacgactgtagttatctattttttacatacttattattaccaccatgctcagtaagtccatttttgcatggaatatggagccttaaaacatgtcatgaatttggagtccctggcacataaatctaccttcaaatcagaggtccttaatgatgcctaaacatacagtaaaattagaatcagaaatacttctttaaaaaatattcaaaatgtgtttgtttcccatgggattattctctatcccacacgaatgtaaaaaaatccacattaatgatccatttaagtatagttttattgggtccttttctaatgattaaaggttctttctcaatttcattcctcagtcctgcaagtaaggactcatactgaagagtactgaaacaaggacttcttgtcagaaacagcttctggaatcttgggttttgtttttgttttttgacaaaatacactattggccatgtccatcacgagagtgtttgtagtaattaattaccttgtacaggacctggcacttagtagcattcttcaaatgttccctcagtgatccttttactctccttgtcacttatttgggagaaataggggcacgtgagataagaagaagaataattttgatgttggtatgcttgccctgttacttatagacagtctttgtcataggcaaacttgaatttgatttaaaatagggctgggaaaaatattcaataactgtaagcccccttttggatgccaaacttagaattttgtacattctctgatgaacaagcatttagatcgtaacatggtaaagcctattaccagccaatgttgttagcatctttgtatgcacatcactgtttgtgcaatatatgaatattttgttgcattgtattcttatataaaaataagtagaaaacataaaattgaaattgctgatga

SEQ ID NO: 365 - DNA, 2777 bp, Homo sapiens
gaatacccggctagggacacgagagagaggaatcggggtttctgggtgacggtgatctcggggtgggcaggactccaaaggcccgtcgacccggtggtggactccttgcactgggattggacatatgcaagcgggagatttggggccggcgctcaaaatcggggggcgggggtggactcgggtttggaccccaggatccgatcagcggacccttgattcaacgtgggctccagcgtgacatggctgaagcgcaccaggccgtgggcttccgaccctcgctgacctcggacggggctgaagtggaactcagtgcccctgtgctgcaggagatctacctctctggcctgcgctcctggaaaaggcatctctcacgtttctggaatgactttctcaccggtgtgtttcctgccagccccctcagttggcttttcctcttcagtgccatccagcttgcctggttcctccagctggatccttccttaggactgatggagaagatcaaagagttgctgcctgactggggtggacaacaccacgggctccggggggtcctggcagccgcgctgtttgcctcgtgtttgtggggagccctgatcttcacactgcacgtggccctgaggctgcttctgtcctaccacggctggcttcttgagccccacggagccatgtcctcccccaccaagacctggctggccctggtccgcatcttctctggccgccacccgatgctgttcagttaccagcgctccctgccacgccagcccgtgccctctgtgcaggacaccgtgcgcaagtacctggagtcggtccggcccatcctctccgacgaggacttcgactggaccgcggtcctggcgcaggaattcctgaggctgcaggcgtcgctgctgcagtggtacctgcggctcaagtcctggtgggcgtccaattatgtcagtgactggtgggaggaatttgtgtacctgcgctcccgaaatccgctgatggtgaacagcaactattacatgatggacttcctgtatgtcacacccacgcctctgcaggcagctcgcgctgggaatgccgtccatgccctcctcctgtaccgccaccgcctgaaccgccaggagatacccccgactttgctgatgggaatgcgccccttatgctctgcccagtacgagaagatcttcaacaccacgcggattccaggggtccaaaaagactacatccgccacctccatgacagccaacacgtggctgtcttccaccggggccgattcttccgcatggggacccactcccgaaacagcctgctttccccgagagccctggagcagcagtttcagagaatcctggatgatccctcaccggcctgcccccacgaggaacatctggcagctctgacagctgctcccaggggcacgtgggcccaggtgcggacatccctgaagacccaggcagcggaggccctggaggcggtggaaggggccgctttctttgtgtcactggatgctgagcccgcggggctcaccagggaggacccggcagcgtcgttggatgcctacgcccatgctctgctggccggccggggccatgatcgctggtttgacaaatccttcaccctaatcgtcttctctaacgggaagctgggcctcagcgtggagcactcctgggccgactgccccatctcaggacacatgtgggagttcactctggctacagaatgctttcagctgggctactcaacagacggccactgcaaggggcacccggaccccacactaccccagccccagcggctgcaatgggaccttccagaccagatccactcctccatctctctagccctgaggggagccaagatcttgtctgaaaatgtcgactgccatgtcgttccattctccctatttggcaagagcttcatccgacgctgccacctctcttcagacagcttcatccagatcgccttgcaactggcccacttccgggacaggggtcaattctgcctgacttatgagtcggccatgactcgcttattcctggaaggccggacggagacggtgcggtcttgcacgagggaggcctgcaactttgtcagggccatggaggacaaagagaagacggacccacagtgcctcgccctgttccgcgtggcagtggacaagcaccaggctctgctgaaggcagccatgagcgggcagggagttgaccgccacctgtttgcgctgtacatcgtgtcccgattcctccacctgcagtcgcccttcctgacccaggtccattcggagcagtggcagctgtccaccagccagatccctgttcagcaaatgcatctgtttgacgtccacaattacccggactatgtttcctcaggcggtggattcgggcctgctgatgaccatggttatggtgtttcttatatcttcatgggggatggcatgatcaccttccacatctccagcaaaaaatcaagcacaaaaacggattcccacaggctggggcagcacattgaggacgcactgctggatgtggcctccctgttccaggcgggacagcattttaagcgccggttcagagggtcagggaaggagaactccaggcacaggtgtggatttctctcccgccagactggggcctccaaggcctcaatgacatccaccgacttctgactccttccagcaggcagctggcctctccaaggaataagggtgaaattgccacagctggctgacacaggacaggggcaactggtttggcaaccccacatccaggccaataaagatgtgtgagctggg

SEQ ID NO: 366 - DNA, 6309 bp, Homo sapiens
gagaatttccagcaggcaaggcagtggccgctttgactgcttgcttcggagatccgagacgacggagaaggcactcttatttaccgaccaagaaagctcctcccccgtcctccgttagctaattaaaacatttttcagggacgtagccatccagagacattccattattgttccattgacctttccctcatcactgagtcctttggagctgagttatgtcaacagctgccttaattactttggtcagaagtggtgggaaccaggtgagaaggagagtgctgctaagctcccgcctgctgcaggacgacaggcgggtgacacccacgtgccacagctccacttcagagcctaggtgttctcggtttgacccagatggtagtgggagtccagctacctgggacaattttgggatctgggataaccgcattgatgagccaattctgctgccacccagcattaagtatggcaagccaattcccaaaatcagcttggaaaatgtggggtgcgcctcacagattggcaaacggaaagagaatgaagatcggtttgacttcgctcagctgacagatgaggtcctgtactttgcagtgtatgatggacacggtggacctgcagcagctgatttctgtcatacccacatggagaaatgtattatggatttgcttcctaaggagaagaacttggaaactctgttgaccttggcttttctagaaatagataaagccttttcgagtcatgcccgcctgtctgctgatgcaactcttctgacctctgggactactgcaacagtagccctattgcgagatggtattgaactggttgtagccagtgttggggacagccgggctattttgtgtagaaaaggaaaacccatgaagctgaccattgaccatactccagaaagaaaagatgaaaaagaaaggatcaagaaatgtggtggttttgtagcttggaatagtttggggcagcctcacgtaaatggcaggcttgcaatgacaagaagtattggagatttggaccttaagaccagtggtgtcatagcagaacctgaaactaagaggattaagttacatcatgctgatgacagcttcctggtcctcaccacagatggaattaacttcatggtgaatagtcaagagatttgtgactttgtcaatcagtgccatgatcccaacgaagcagcccatgcggtgactgaacaggcaatacagtacggtactgaggataacagtactgcagtagtagtgccttttggtgcctggggaaaatataagaactctgaaatcaacttctcattcagcagaagctttgcctccagtggacgatgggcctgattaccagctgggacttagagtttctgtgcaacagtttttcactgagcatgtcaagaaactgataagatcaaaaaggtctcctaactcactagatcagcgcacaagtcagtgtaaaccacttagatagtagttttttcataaatgctcatcatatttatgttccgctgtacatgttcagtataaatatatgtgtagtgaagctactgtgagtctttaaatggaaagagcaaatgagaagtggtttggatacacttgatgagagatgagagtgtcacattaataatttttaagactcttaggcagctatgggtttcttttgatcatttttgttctttattcatttgaacacgtttttgaagttcttcaaaactagtcagtttgaattttgacagctattcaatatgtgatctccaagtttaaaaaaatttttttccagacttccctaatcctaaaatgcgagtttttatttttaataactgtaccaaggaataagtatgaaaacagttctctgttaccatattttgtattctggaccacttactggtgaaagcaaccatgcaaaagaaattaatttggccaggcacagtggctcatgcctgtaatcccagcactttgagaggccaaggtgggtagatcatctgaggtcaggaattcaagaccagcctggccaacatggtgaaaccctgtctctagtaaaaatccaaaaaaaaaaaaaaaaaaaaaaaaaaaattggctgggcgtggtggcagacacctgtaatcccagctactcgggaggctgaggaaagaggaatcacttgaacccaggagatgggggttgcagtgagctgagatcatgccattgcactccagcctgggcagcaagagcgaaaaactccatctcaaaaaaaaaaaaaaaaagaaagaaaagaaattaattcagatgatgtgacattactaaattgtatacatatttataaatgtgtatttcagctgtctcatcagccctcccctccatttattcctatttttctgtagttaagaatactgtaaaaatgtgactattccttaatatcagaaaagaatgcacaggctgagtcttccggtcaaaagttaaatactgatggaatcaagtattttgtatgaagttctcatttgttatctctaacgctattttgtgttttgcatatagtattatagtatgtgtatatcactttttgtatagagtaagcaattgaataatttgttaataaaaataataccacattgactgatactgctatagacatagcttgagttttatgtctcctttttgctcattttctaagacttaggagaaagaataaatctaaaatgaccattaaaacattctccatttcagcttgctgtgtaacttaggaagtataaaactatacttctctttatctgcatgtaagtttgctgttaaaatgtgaatttctaaatgtgtatttggaattatttccgtagtttatttctgcaaactatgtaaatttgttatatgtgtgagtatgtgtacatatgtatattttagagtaatataaaattaaagggaacaatcttgcatagctctttcaccagttttaaattattgatacgttatttttaaggactcttgacaaactaggggcaattttcttatagtggagacccagtgattatcagcagatgaggaaataggttaaaaattgctatatggcaatttgtatataaagtaataggatgtgagaaaaatactgaatcttaagaatgacatggaattctgtggcagaaacaaaagaaaaagttgatgtagtatataccttcaactgtgttttgagttgacttttttttttttctttaagctttgggtaaaaatgtatgaggagggagagggcccaatataaatatttacatcttcttacctttttggaaatggaagaagataaatcttgagtttttctgcctatattaatcaggaattgccctttgaaaaaagtgctaaataaatattttgattttttttttcaagggaagttaggtgaaagaaggaaaaacatcacaggaaagactgttaacattctgtttgttgtctgagaggtgaggaaccaaagggaggcaactaaagcgggaaaccatcttgctttttctaatcagttcttggaacagaaatgtggaagctacctttaggaacatggagaatttccaaaccaacaggcaaaggaaaactaacgcacaaaaatgacattctgaagatgcaggtttcagccaggcgcggtggctcaagcctgtaatcctagcactttgggaggccaaggcaggtggatcacctgaggtcaagagttagagaccagcctggccaacatggtgaaacctcatcttgaccaaaaaatgcaaaaattagccaggcgtggtggtgggtgcctgtaatcccagctactggggaggctgaggaaggagaattgcttgaacctgggaggcggaggttgcagtgagtcgagatcgcgccattgcactccagcctggacagcagagcaaaaactccatctcagataaataaataaacaaatatgcaggtttcatttttgttttgaatgctttacattactattcctatcttttactttaaaaactaagatgaggagtgatgttgtcaagttcaaaggcatgagggtgattgatggattgaggtagatagccaagtttgtctgtttttgttttttatagttacagagtctcactttgttgtccaggctgaagtgcagtggtgcaatcatagctcactgagattgccaggttcgacaaagaggaatttataggatggggatatagggtagacttgactctgctttatccgggaaagcttttaaaactctgagccagttaactttgagtaagcataaaacatactgtattggtgtttgtatttttcatgccacaatattaaaatggaattttaaatgtagattattataatctataaaagataagtatgcatgtattaggatactggaaaatatgcaaatcatagtaaaaaaaaagggactgctctagtttttcagttataactgaatttgccatgtgggtataggcatagtgtaaattacattaatgtagtaaaacatcaattgtggttcggtttgtctttcatttatgtgtagtatagaaatcacctttctaatatgtgttgccaaactatttgccaccatctatttggtgaaatattcattgtcattgtgattttccacaagtataagttcttaagtactttatagattcagaagtaaatgctgtcctgttctccatcagctgttcgtttgttacagattttgtatttctttttttttttttttgagatggagtctcactctgtcacacaggctggagtacagtggtgcggtctcggctccctgcaacctctgcctcccgggttcaaacgattcttctgcctcagcctcctgagtagctgggactacaggcgcgtgccaccacccctggctaatttttgtatttttttttcttttttttttttgagaaggagtctctctctgtcacccaggctggagtgcagtggcacgatctcggctcactgcaagctgcgcctcctgggttcacgccattctcctgcctcagcctcccgagtagctggaattacaggcgtccgccaccgtgcccggctaatttttttgtatttttagtagagatggggttttgccatattggccaggctggtctcgaactcctgacctcaagtgatccacccacctcggcctcccaaagtgctgggattacaggcatgagccaccgcacctggccagatctttgtatgtcttaagtgtttcaaagttataagcatttttctggggggatgtccattttggagggatccattttgatcctttgtactctataatgtgaactttcccctgttccaacacttaaaagagaattattagcacataatctaaaagatggaattttttttttttcttgagacagagtctcgctctgtcgccaggctggagtgcagtggcgcgatcttggctcactgcaacctctgcctcctgggtttaagcgattctcctgcctcagcctctggagtagctgggactactcgtgcatgccaccacgcccggctaatttttgtatttttagtagagacagggtttcaccatattggccaggatggtctcgatctcttgacctcgtgatccacctgcctcggcctcccaaattgctgggattacagcactgtgccctcctaggaaattattttttaagtgaaattttatttttattttttttaggattttggtagagaatgagtaggcctactcatcaatatcaaacaggacatttagtttctttccttagaacagacataaatttaatttcatggtaatatgataataagaaaatgcttctatttttctttagcacctccatggttctcatatacccatgtctgtaaaaagtgacatgagaattttgttgggttacattttattgtatttattagattcgcttatatagatgacttaggcagaaataaagtcatgtctttagaaggtgaacaagccaacttgtgatggcctgccttttgcttttggcagttgggatgagaacaattgactctcccattggttgttagatagttgaaatggtgcgttggtggtcatacttagtgttctaggctgtgaaatcatggagttcttccacttccaagaatgactcatttgctgttggattctagtacagaatttagcagcctgatgtgtccccaaactgatttaatttctactgaagtgcccttgtgtacatttgttttgtaatttaccaaagtactacctgagtgtataatgactcctgcagtgagttaatgtaattgctgctttgaccattgttttaaatctgtgtactagagtaactgtgagcagaatgaaatcacattatctcagtgttcaaaatatcattctaataaagtacatgcattaaacaa

SEQ ID NO: 367 - DNA, 2033 bp, Homo sapiens
gtgcctatgtctgggagggagggaagatggcagccgtggcggcaggcggcctggtgggaaaggggcgcgacatcagcctagcggccctgcagcgccacgacccctatatcaaccgcatcgtggacgtggccagccaggtggctctgtacaccttcggccatcgggccaacgagtgggagaaaactgatgtggaaggaaccttatttgtttatacaaggtctgcttctccaaagcatggattcaccattatgaataggctgagcatggaaaataggacagaacctattactaaagacttggatttccaactccaggaccctttccttctctacagaaatgccagattgtccatctatggaatttggttttatgataaggaagaatgccaaagaattgcagagcttatgaaaaacctaactcagtatgaacagttgaaagcccatcagggaactggagcaggaatttccccagtgatcctcaattcaggagagggcaaagaagtagacattttacgaatgctcatcaaggccaaagacgaatacacaaagtgtaaaacctgttctgagccaaaaaagataaccagttcctctgccatctatgacaatccaaatctcatcaaaccaattccagtgaaacccagtgaaaaccagcaacagcgtatacctcagcccaaccagaccttagaccctgaaccccaacacttatccttgacagctctgtttgggaagcaggacaaagctacatgtcaggaaactgtggagcctccgcagactctccaccagcagcagcagcagcagcagcagcagcaagagaagcttccaattaggcagggggttgtacgctccctgtcctatgaggaacccagaagacactcaccccccattgagaagcagctctgtccagccattcagaaactcatggtcaggagcgcagacctccacccattgtcagagctgcctgaaaaccggccttgtgaaaatggcagtacccattctgcgggagaattttttacaggacctgtccagccagggtctcctcacaacattggaacttctcgtggtgtacaaaatgcttccagaactcagaacctgttcgagaaacttcagagtaccccaggggcagcaaacaagtgtgaccctagtacaccagcacctgccagctcagctgccctgaaccgcagcagagctcccacttctgtcacccctgtggctccaggaaagggtctggctcagccaccacaggcctatttcaatggctcccttccacctcagacagtaggacatcaggctcatggaagagaacagtccacactcccaagacaaacactccccatctctggtagtcagactggcagctctggagtgatctcccctcaagagttactgaagaagcttcagattgtacagcaggagcagcagctgcatgcctctaaccggccagccttggccgctaagtttcctgtgctcgctcagagctctggaacagggaaacccttggaatcctggatcaacaagacacccaacacagaacagcagactcctcttttccaggtcatctcacctcagcgcatccctgctacagcagctccgtctctgcttatgtcccccatggtgttcgcacaacccacctccgtcccgccaaaggaaagggagagcggcctcttgcctgtgggaggccaggagccacctgctgctgccaccagcctcctcctgcccatacagagcccggagccctccgtgatcaccagcagcccactcaccaagctccagctccaggaggcactgctgtacctcattcagaatgatgacaacttcttaaatataatctatgaagcctatctcttcagcatgactcaagcagccatgaaaaagactatgtgacagcaaggccttttaaaactgattttcaaggtccttctagaactccggcacaaggttctttcatgttgagtgttgtttccttcaatgtttctgccttttttaaaaaaaaagtatgtgtaatatgaagtaaaatgtttcagacttttttttata

SEQ ID NO: 368 - DNA, 2477 bp, Homo sapiens
gtgagcctggtggttggcagctggagccacgtcggagggggaagtgtcgcagcattctctgcaggcatcacagacctgaggcagtggcctccggagggcactggacagaaacagccatccaagtggctgagtggagggaccctgctcaagtgcagctgcagtggccggggtttccctcaggtagggatcggggcgccttgtcgccgccagccacgtgtggcgtccggtacagtcagcagagtgcagggtgcgggcaccaggaaagggggcgcaggggaactcccgcgggcctcgcgtttgcaaacttctcgcctgggcaggaggcggtcgtgggaaagaaggtggaagagcgagctttttggaactgtgcacgggacagattggacgcacacccctcgggaggcgcgaaggcatggaaaatttgaagcatattatcacccttggccaggtcatccacaaacggtgtgaagagatgaaatactgcaagaaacagtgccggcgcctgggccaccgcgtcctcggcctgatcaagcctctggagatgctccaggaccaaggaaagaggagcgtgccctctgagaagttaaccacagccatgaaccgcttcaaggctgccctggaggaggctaatggggagatagaaaagttcagcaatagatccaatatctgcaggtttctaacagcaagccaggacaaaatactcttcaaggacgtgaacaggaagctgagtgatgtctggaaggagctctcgctgttacttcaggttgagcaacgcatgcctgtttcacccataagccaaggagcgtcctgggcacaggaagatcagcaggatgcagacgaagacaggcgagctttccagatgctaagaagagataatgaaaaaatagaagcttcactgagacgattagaaatcaacatgaaagaaatcaaggaaactttgaggcagtatttaccaccaaaatgcatgcaggagatcccgcaagagcaaatcaaggagatcaagaaggagcagctttcaggatccccgtggattctgctaagggaaaatgaagtcagcacactttataaaggagaataccacagagctccagtggccataaaagtattcaaaaaactccaggctggcagcattgcaatagtgaggcagactttcaataaggagatcaaaaccatgaagaaattcgaatctcccaacatcctgcgtatatttgggatttgcattgatgaaacagtgactccgcctcaattctccattgtcatggagtactgtgaactcgggaccctgagggagctgttggatagggaaaaagacctcacacttggcaagcgcatggtcctagtcctgggggcagcccgaggcctataccggctacaccattcagaagcacctgaactccacggaaaaatcagaagctcaaacttcctggtaactcaaggctaccaagtgaagcttgcaggatttgagttgaggaaaacacagacttccatgagtttgggaactacgagagaaaagacagacagagtcaaatctacagcatatctctcacctcaggaactggaagatgtattttatcaatatgatgtaaagtctgaaatatacagctttggaatcgtcctctgggaaatcgccactggagatatcccgtttcaaggctgtaattctgagaagatccgcaagctggtggctgtgaagcggcagcaggagccactgggtgaagactgcccttcagagctgcgggagatcattgatgagtgccgggcccatgatccctctgtgcggccctctgtggatgaaatcttaaagaaactctccaccttttctaagtagtgtatcaaaatctaaaccaaggagtctctggacaagaagctgggagaggcacaaactggacatctctctctctcatatccttcggcattgggttatctatgggtgcaaggagtgggcacgcttctctgttacaaatagaaaacgattccagtcatacaggacacatcccactccaaatgatatttccaaaaacatacctctgacagtaactttgatagatggtttgtcaaatgtatctttctgggtatccacacctcttggcaatgaaatttgcagctcctcccttccataaatgaagtctctttccccaccatttgaatctgggctggcactgtgacttgatttgatcaatagaatgtggaagaagtgactgtatgccagttccaagcctaggtttcaagaggccttataaatgtctgttggaaccttacccagccatgaacatgttgagtgagcatgctggagaatgagagaccacatgaagcagaaacatgctttcctagctgaagtcatactagcccaaccaacatggcagctaacacatgaatgaggccaatcaagaccagaagaaccactcaagcagatcccagcccaaattgcccattcacacaatcaggagctaaataaattactgttgtcttaacactaa

SEQ ID NO: 369 - DNA, 7150 bp, Homo sapiens
actctgacacaccctcagaaagtcagagtactgggagaacagaagacttcacaatttaatgcctcagtttttaaaaaaggatccttacacttcatgtctcctagccatcagaagaggaatgagacagcaaaagttcaaatggcctgtttcaagtttctgatataaaacgatgacattttcaggaaaatcctgcatttccagagagagactggctggttaaatttctgaaagaggacaccagctaaaagaaggtattgcatctcacccgagcagactgtgtctgtggaaagtgtaagccccttgccagaagagcagcttcccagcaaaggcagagggtgaaaacagcaaaggtcttaagacactggggacctagagtcaaaagggacctcctccagggaaaacgctgtgtgagaaatggcctcattcggtgactgtgagtgacacagcagaaagttgggtcattccggctgcttttttgagaagtccctgaagagatcaataacagcaagagggaacctggcaaggaagctattcctataatccaggaaagagatgaggaaggcttggaccaggtggtagtggtgtcaggtagtcaaatgctgggtatattttgaagatacaccccataggatttgctccacattgaatgtggaatgctggaagagagataaagtgtacctgtcacatactttttgagttttatttattttcttagaagtaagtacacaaagagatgctacctaggagaagggtattcttttcactattctttcaaattttctgtatgttcaaacattttcatagtagaaagttggggggaaaatctgtttcataaacatttcctcagcagcagtccagtctattgcattttaattggttgtgatatcattgttttatgcaatacgttctcaacaagtatatcctccggcaaactgaacaaggaccaagtctgttctgcctacagctctgcttcctcatagctgctttccagaacgtgactcttgcaaattatcaagaaaggggaactaatctaagggatccagatcaaacagcctcatgaagacttattttatgtttctaatataaagatagaagttttcagaaaagccctgctacacagaggatcagagcaggggtgggcctgctgggctgcagctgggattctgagcatcctttcccggaggcacggaaagtgagtgagtgagcccagtgaggaagaagttgaagctttgatatgagtaaacaagtatctctacctgaaatgattaaagactggaccaaagagcatgtgaaaaaatgggtaaatgaagaccttaagattaatgagcaatacgggcaaattctgctcagtgaagaagtaacaggattagtcctgcaggaattaactgagaaggaccttgtagaaatggggctaccatggggtccagcacttttgataaaacgttcatacaacaaattgaatagtaagtcccctgaaagtgacaatcatgatccgggacaattagataattcaaaaccgtccaaaacagaacaccagaaaaatccaaaacacaccaaaaaggaagaagaaaattcaatgtcatctaatattgattatgatcccagagagatcagagatatcaaacaagaagaatcaattcttatgaaagaaaatgtgttagatgaagtagcaaatgctaaacacaagaaaaagggtaagctaaaacctgaacaattgacttgtatgccatatccttttgatcagttccatgacagccatcgctacatagaacattatactctacaacctgaaacaggagcactcaatctcattgatccaatacatgagttcaaagctctcacaaacacagaaacagccacggaagtggacattaagatgaaattcagcaatgaagtcttccgatttgcatcagcttgtatgaattcacgcaccaatggcaccatccattttggagtcaaggacaaaccccatggagaaattgttggtgtgaaaatcaccagtaaggctgccttcattgaccacttcaatgtaatgatcaaaaagtattttgaagaaagtgagatcaatgaagccaagaagtgtattcgggagccaaggtttgtggaagtccttctgcagaacaatacaccatctgacagatttgtcattgaagttgatactattccaaaacactctatatgtaatgataagtatttctacattcagatgcaaatttgtaaagataaaatatggaaacaaaaccaaaatctttcactgtttgtaagagaaggggctagctctagggatatcctggccaattccaagcaacgggatgtagatttcaaggcatttttacaaaatttaaagtcactggtagcatctagaaaagaggctgaagaagagtatggaatgaaggcaatgaagaaggagagtgaaggactaaagctggttaaacttctcataggaaaccgagactcactggataattcatactatgactggtacattcttgtaacaaataaatgccatccaaaccaaataaagcacttagattttttaaaagaaattaaatggtttgctgtgttggagtttgatcctgaatctatgatcaatggagtggtcaaagcttacaaagaaagtcgggtggcaaaccttcactttccaaatcaatatgaagacaagacaactaacatgtgggagaagatttctactcttaatctttaccaacagcccagctggattttctgcaacggcagatcagacctgaaaagcgagacatataaacctctagaaccacatttatggcagagagaaagagcttcagaagtcaggaaactaattttatttctcacagatgaaaatataatgacaagaggaaaatttttggtagtgtttctattactctcttcagtggaaagcccaggagatccactcattgaaactttctgggctttctatcaagctctcaaaggaatggaaaatatgttgtgtatctctgtaaactcacatatttatcaacgatggaaagatctactacaaacaagaatgaagatggaagatgaactaacaaaccacagtatttccactttaaatatagaactggtaaacagcactatccttaaactaaaatcggtgactcggtcatcaagaaggtttttgcccgcccgtggatcttcttcagttatcctagagaaaaagaaagaggatgtcttgactgcactggaaatcctctgtgaaaatgagtgtacagagacagacatcgagaaagacaaatctaaattcctggagtttaagaaatcaaaagaagaacacttttatcgaggtggcaaagtatcctggtggaacttctatttttcttctgaaaactattcttcagattttgttaaaagggacagttatgaaaagcttaaagatttaatacactgctgggcagagtctcctaaaccaatatttgcaaaaatcatcaatctttatcatcatccaggctgtggaggtaccacactggctatgcatgttctctgggacttaaagaaaaacttcagatgtgctgtgttaaaaaacaagacaactgattttgcagaaattgcagagcaagtgatcaatctggtcacctatagggcaaagagccatcaggattacattcctgtgcttctccttgtggatgattttgaagaacaagaaaatgtctactttctacaaaatgccatccattccgttttagcagaaaaggatttgcgatatgaaaaaacattggtaattatcttaaactgcatgagatcccggaatccagatgaaagtgcaaaattggcagacagtattgcactaaattaccaactttcttccaaggaacaaagagcttttggtgccaaactgaaggaaattgaaaagcagcacaagaactgtgaaaacttttattccttcatgatcatgaaaagcaattttgatgaaacatatatagaaaatgtagtcaggaatatcctaaaaggacaggatgttgacagcaaggaagcacaactcatttccttcctggctttactcagctcttatgttactgactctacaatttcagtttcacagtgtgaaatatttttgggaatcatatacactagtacaccctgggaacctgaaagcttagaagacaagatgggaacttattctacacttctaataaaaacagaagttgcagaatatgggagatacacaggtgtgcgtatcattcaccctctgattgccctgtactgtctaaaagaactggaaagaagctatcacttggataaatgtcaaattgcattgaatatattagaagagaatttattctatgattctggaataggaagagacaaatttcaacatgatgttcaaactcttctgcttacaagacagcgcaaggtgtatggagatgaaacagacactctgttttccccattaatggaagctttacagaataaagacattgaaaaggtcttgagtgcaggaagtagacgattcccacaaaatgcattcatttgtcaagccttagcaagacatttctacattaaagagaaggactttaacacagctctggactgggcacgtcaggccaaaatgaaagcacctaaaaattcctatatttcagatacactaggtcaagtctacaaaagtgaaatcaaatggtggttggatgggaacaaaaactgtaggagcattactgttaatgacctaacacatctcctagaagctgcggaaaaagcctcaagagctttcaaagaatcccaaaggcaaactgatagtaaaaactatgaaaccgagaactggtcaccacagaagtcccagagacgatatgacatgtataacacagcttgtttcttgggtgaaatagaagttggtctttacactatccagattcttcagctcactccctttttccacaaagaaaatgaattatccaaaaaacatatggtgcaatttttatcaggaaagtggaccattcctcctgatcccagaaatgaatgttatttggctcttagcaagttcacatcccacctaaaaaatttacaatcagatctgaaaaggtgctttgacttttttattgattatatggttcttctgaaaatgaggtatacccaaaaagaaattgcagaaatcatgttaagcaagaaagtcagtcgttgtttcaggaaatacacagaacttttctgtcatttggatccatgtctattacaaagtaaagagagtcaattactccaggaggagaattgcaggaaaaagctagaagctctgagagcagataggtttgctggactcttggaatatcttaatccaaactacaaagatgctaccaccatggaaagtatagtgaatgaatatgccttcctactgcagcaaaactcaaaaaagcccatgacaaatgagaaacaaaattccattttggccaacattattctgagttgtctaaagcccaactccaagttaattcaaccacttaccacgctaaaaaaacaactccgagaggtcttgcaatttgtaggactaagtcatcaatatccaggtccttatttcttggcctgcctcctgttctggccagaaaatcaagagctagatcaagattccaaactaatagaaaagtatgtttcatccttaaatagatccttcaggggacagtacaagcgcatgtgcaggtccaagcaggcaagcacacttttctatctgggcaaaaggaagggtctaaacagtattgttcacaaggccaaaatagagcagtactttgataaagcacaaaatacaaattccctctggcacagtggggatgtgtggaaaaaaaatgaagtcaaagacctcctgcgtcgtctaactggtcaggctgaaggcaagctaatctctgtagaatatggaacagaggaaaaaataaaaataccagtaatatctgtttattcaggtccactcagaagtggtaggaacatagaaagagtgtctttctacctaggattttccattgaaggccctctggcatatgatatagaagtaatttaagacaatacatcacctgtagttcaaatacgtttatttatatctttatgattttattctctctctctattctcatggcactttcataacattatggctaacctctaattacagattttgcttttgcctccctgaatgaattacaagcctttttaagatatgaaatatgcctacccgcagagcttggcacaaagtggagtcaatcttttaatgttttaaatatgcattttcagactcaaataattaagaagtttcattgatatccactggtcacatcataactgtctatagggcaataaaatctgtgttaaactcaattgcttttataagttttctaaattatttcttcactgtgacagcaaagatttaaataagatgaatgtaaaagagaaagcttattggactcaaacccacagatccacaccagagttctatttacctcatcttggtatcaataaaaacttatgtggaaggtaaatatattgttccccatccaccacataacactctccccaacacacacacacacacacacacacacacacacacacacacacactccttgtaccccttgcccttctcccagctcattgctccaggagagagaagagttcaaaaaataaagtaatcataaacttgaactctctccattctcttgttcccatttacaggtgaatctcttcctttaagccatttttgtctcctgtgaatacagccttatctccacctgtttcttagatcccatctcccctggcttattttttccattcattaccctctttgttccctttacttctcaacctgtgctatatacatgctgttctctctgttgagattgccttatttccatctaacattctctctcctgctattctgatttgtcattcacaactgatttcaagagtcaccttcaccaggaagtcttccttgaccaccatcattcctgcctgattagagggcttcctcatggtaatatgtgttctcaagttttcagtgtcaaggaatgccatcccagaagctcattctcagatgcacaacagccagaacagtctcaagcagcattctagagcttggaatttaagaactacgcattgcctataaagtgaaacataggctaatatagattaaattgaatattgaataaaaaatatatttatttatcca

SEQ ID NO: 370 - DNA, 4490 bp, Homo sapiens
gatgaaacgcggcctccagctccgctccgccgcgggcccgggaggcgcgttccctcttggccccaaagcgagtccggcgggcggctcctcggggttgggcgaccgagcggggccggccgggcggggggcgggcccgtgaaggcggcgcagcgcggcgcgggaggcgtgctgggcgcggggctgcggtgcccagaggctgcggcattaggggctcggcgcccccgaccttccgcgtcccggggtggcggcggcggcggcggcggcggcgcgggcggcatatgatgctgagctggctgctccagaatgaaccacagctctgagaaggggaagtagaaacagctggcgccctgccatggcctgtgaaccacaggtggacccgggggccactggcccattgcccccctcctcccctggctggagtgccctgcctggagggagccctcctggctgggggcaagagctccacaatggccaggtcctcactgttctccggattgacaatacctgtgcacccatctccttcgacctgggagccgcagaagagcaactgcaaacttggggcatccaggtcccggctgaccagtacaggagcttggctgagagtgccctcttggagccccaagtgagaagatatatcatctacaactcgaggcctatgcggctggcctttgctgtggttttctatgtggtggtgtgggccaatatctactctaccagtcagatgtttgccttggggaaccactgggctggcatgctgctcgtgaccctggccgcggtgagcctgaccttgactcttgtgctggtctttgaaagacaccagaagaaggccaacaccaacacggacctgaggctggcagctgccaatggagccctcctgagacaccgggtgctgctgggggtgacagacacagtggaaggatgccagagtgtgattcagctttggtttgtctacttcgacctggagaactgtgtgcagtttttgtctgatcatgttcaagaaatgaagactagccaagagtccttgctgagaagcagattgagccagttgtgtgttgtcatggagactggggtgagccctgcaacagcggaggggcctgagaacttggaggatgctcctctcctgcccggcaattcttgtcctaacgagaggccactcatgcagactgagcttcatcagcttgttcctgaggctgagccggaggaaatggcccgccagctgctggcagtgtttggcggctactacatccggcttctagtgacctcccagctccctcaggcaatggggacacgacacacgaactctccgagaattccatgcccctgccagctcatagaagcctacatcctaggcacagggtgctgcccgttcctggcgaggtgacctagggatgaaggtactcatcttccttcaagactgagcagtcaggaaggcttcaggagcccaagatggccaatggggagccccaggtgaggagagaagcatctgggggcactccaaaaggggcctgtgatgtcagccactggggtgttgtgctcacttcagggcccagcacaaaaatccttgtttgacatctcatgctgaccccctggcctttgcagaagctgatggttacagagctagtcccaccaaagctactctctctgctgcttagaactgtggacacgtatggaaagactggacccccattgctttcattgttcagagaacccaggagacatgaagatgaccagactgggcaaattatgtgtccaaaacttggcctcagatgatgtttccatctccaaccccttcatgccagatggggaaactgaggctcagagaggatactgctctatgtggcattgccttgaacccctaaaattatcagacttcctttttccaatataaagaaaaaaagtaagttttcagaattctctcaatttttaagtttttctcccccatattttgtgaaaagcagtggtatgtgtacgtgttgtctaccagtacacaggctgcagaagacagagacagaagaaagagatcaagggcagataactgttgataggaatatttgagaaagattgatcctgtttgacttgaggacttattttgttcacaggcatgcacgcttgtggttgtggttttatattacagatgtagaacaatggttatgtttcccgacatgaacattgtcctggaatgaagtgtgatcagccacttgtggaattctttgaagagctcagaggcttccaagtgatctgctcctgaacaagtttgaagacctattgtttcatagacccaagaccaaacgcatctaaaggatccccagcccccaagacctagcctttgtctgcgattttggcttcatctcccacaaaacccctttatgagttcacgctctttcctggactgacatacctattcctttccatttgttggactcctattcatgcttcaaagtccagctttcttaagcccttctttaggaagccttcccacacagccaaccctgctgctctctgcctcctttaaattcttgatacagctgctgcttgttctgatgttttatggtattgattctgttttcctgtgtatatgccagtttttctagctagactgtaaactccttaaggacagagactacaccttgtactttttgtgcatgacctggacctgctaaggaaaaaaaaatcttgtggattgattgctttgccatccccacagcagcttttgcaaattgctttccaaactcacttgaatgatgacattgctgtggacctgggttctggacctgatctgccacttcaagctgtgtaatttttggcaagttgctttctttgcctggtcctcagtttgcccatcaatataatgggtggattggatgatttttttttttttaattgagatggagtcttgcactgtcacccaggctggagtgcagtggcgcgatcttggctcactgcaacccccgccacctaggttcaagtgattctcatgcctcagcctcccaagtagctgggactacaggtgtgcaccactactcctggatatttttttgtgtttttagtagagatggggtttcgccatgttggccaagctggtcttgaactcctgacctcaggtgatccacccgcctcgggctcccaaagtgctgggattacagacgtgaggcaccacaaccagcctggatgattcttaagggcccttctaggaccaaagttctgggaatttctagcttattctgccccctcatagcccttggcctatctatctttatccacatgcagaaacatctggcaaccccacatggctgagatgacctggtcctaggacacccttggacagaagactggcctacctagcagacctggatttttcttcctgatctgctgcttccaagttgtgtgaccttggctaagtcacttaacctttctgattgtcatttcgctttttaataaagtgggtctggtgaacaagaaatgtaataaacacgtggcttgccattcaagagatgagtctgaccattcactttctgtgtgccagagaagagagatcatgggtatagaccagcccctggaaaggctgctttggtcaaggctgagagcagctttgctcaaggaaattattcacgaaggtgaccactgtctttctgacctggcacagaggaaatgttggctgtgaatgtgaccaatagaaagaagcccgtatttctcagtcagtcctagaaccccggtaagtaattaacagagaataaaaatgtgtttgttaaatgacaaagcagcagtttttcaattgtaaggtctgcttgagagcctttgatgtgtgtttcttttcctgacttttcctttctttagaatttttgatggtctcacctggtgggtggggctttcagggtatgcccacaatgtacatttctcggcatctgtgcctcagtttcctcatttataaaatccctatgatctctgtctcacctactttacagggttgctgtgaagatcgcatactacacacaggaatgctcatcagtttttaaattttatttaatttttatttatttttttttaaatgtaattttttcagagagataaggtcttgctatgttacccagcctagtcttgaactcctggcctcaagtgatcctcctgccttggcctcccatgctgctgggattacaggtgtgaactaccatgcccagccagctcctaagtcttaaggctctgtgttagtgatagatgtggccatggtgtaggcagtgcaatgtcttcgagtgagagtgaaggtggtaactcattgcatggattctagagttctgtttattctaatccaagttcttccacttaaaaacaatgttcttcctctcattgagtctcattcctcatctataggatgggaataagagcatgtacctggcaggttgttgtaaggattaaatggtgtaaaaaaatgtcaagtgcttgcaactttgaataccaaacttgagtgaaagctcaataaattgttacttaaaaaa

SEQ ID NO: 371 - DNA, 2165 bp, Homo sapiens
agagcgccgccgccgccgctgctgcagcagcagctgctctgcagagtggtggccggggccagggccggggtgccctccctcccaccttctcccgccatgagccagggaagtccgggggactgggcccccctagatcccacccccggacccccagcatcccccaaccccttcgtgcatgagttacatctctctcgcctccagagggttaagttctgcctcctgggggcattgctggcccccatccgagtgcttctggcctttatcgtcctctttctcctctggccctttgcctggcttcaagtggccggtcttagtgaggagcagcttcaggagccaattacaggatggaggaagactgtgtgccacaacggggtgctaggcctgagccgcctgctgtttttcctgctgggcttcctccggattcgcgttcgtggccagcgagcctctcgccttcaagcccctgtccttgttgctgccccacactccactttctttgaccccattgttctgctgccctgtgacctgcccaaagttgtgtcccgagctgagaacctttccgttcctgtcattggagcccttcttcgattcaaccaagccatcctggtatcccggcatgacccggcttctcgacgcagagtggtggaggaggtccgaaggcgggccacctcaggaggcaagtggccgcaggtgctattctttcctgagggcacctgttccaacaagaaggctttgcttaagttcaaaccaggagccttcatcgcaggggtgcctgtgcagcctgtcctcatccgctaccccaacagtctggacaccaccagctgggcatggaggggtcctggagtactcaaagtcctctggctcacagcctctcagccctgcagcattgtggatgtggagttccttcctgtgtatcaccccagccctgaggagagcagggaccccaccctctatgccaacaatgttcagagggtcatggcacaggctctgggcattccagccaccgaatgtgagtttgtagggagcttacctgtgattgtggtgggccggctgaaggtggcgttggaaccacagctctgggaactgggaaaagtgcttcggaaggctgggctgtccgctggctatgtggacgctggggcagagccaggccggagtcgaatgatcagccaggaagagtttgccaggcagctacagctctctgatcctcagacggtggctggtgcctttggctacttccagcaggataccaagggtttggtggacttccgagatgtggcccttgcactagcagctctggatgggggcaggagcctggaagagctaactcgtctggcctttgagctctttgctgaagagcaagcagagggtcccaaccgcctgctgtacaaagacggcttcagcaccatcctgcacctgctgctgggttcaccccaccctgctgccacagctttgcatgctgagctgtgccaggcaggatccagccaaggcctctccctctgtcagttccagaacttctccctccatgacccactctatgggaaactcttcagcacctacctgcgccccccacacacctctcgaggcacctcccagacaccaaatgcctcatccccaggcaaccccactgctctggccaatgggactgtgcaagcacccaagcagaagggagactgagtgcctcagcctctcaccccctcctcctcagggcagcgctaggggcctcccctatgcctcagccccatctctgctcctgtttgaattttgttattgttgtttggttgttgtttttttaagttgattttaattttttgtttggttgatttttttgtaaaaaactattttatatataaatataaatctatatctatatctattaaaaaaaatgaagtccagtcatattgatgttaccattacttgggaaggaaagggatgaatggttgtaggacgcccgttggaaaatcacaaatgtttccaaggttcgtcctcttggccatagctggatgaatcttcctcttcggacagggctctttcctgcacagaaatcatactgaggttccatatcctccctcctgctgtcatctcctatatgtacattttaacagacttcctcgtgaacctcttttcagcccattccctcttgctctgtcctcattaaagattaaaaaata

SEQ ID NO: 372 - DNA, 7817 bp, Homo sapiens
cgccgccgtttttcccgcgcgcggacactgtccccgcacggtggtccctcgttggtgcgtggcctgacatccggctggaggcctcgggtgctccgaaagcggtaccttcgggggcccccccgcacccattgtttttccatggtttggactggatatcggtggaactctggtcaagctggtatattttgaacccaaagacatcactgctgaagaagaagaggaagaagtggaaagtcttaaaagcattcggaagtacctgacctccaatgtggcttatgggtctacaggcattcgggacgtgcacctcgagctgaaggacctgactctgtgtggacgcaaaggcaatctgcactttatacgctttcccactcatgacatgcctgcttttattcaaatgggcagagataaaaacttctcgagtctccacactgtcttttgtgccactggaggtggagcgtacaaatttgagcaggattttctcacaataggtgatcttcagctttgcaaactggatgaactagattgcttgatcaaaggaattttatacattgactcagtcggattcaatggacggtcacagtgctattactttgaaaaccctgctgattctgaaaagtgtcagaagttaccatttgatttgaaaaatccgtatcctctgcttctggtgaacattggctcaggggttagcatcttagcagtatattccaaagataattacaaacgggtcacaggtactagtcttggaggaggaactttttttggtctctgctgtcttcttactggctgtaccacttttgaagaagctcttgaaatggcatctcgtggagatagcaccaaagtggataaactagtacgagatatttatggaggggactatgagaggtttggactgccaggctgggctgtggcttcaagctttggaaacatgatgagcaaggagaagcgagaggctgtcagtaaagaggacctggccagagcgactttgatcaccatcaccaacaacattggctcaatagcaagaatgtgtgcccttaatgaaaacattaaccaggtggtatttgttggaaatttcttgagaattaatacgatcgccatgcggcttttggcatatgctttggattattggtccaaggggcagttgaaagcacttttttcggaacacgagggttattttggagctgttggagcactccttgagctgttgaagatcccgtgatcattacctggggaggggttcctgaaaccttccacaatgggatctgtggactttcatttttttaagagacttactcaatttcatgactgtactacctgaaacaaagtgagaaaggacaggtgtatttttctaagtcatcaagataaatccttaagaattcagtctaaattagcaaccaggaaggaaaaatatattaaaaacaacaaaaaagtggcacatgtccaggcagtgtgaggatttgctgtatataagttgcctgctttgtatttttgaaatctctgcatcactcattggaagtgcttctgaagagagctgctctgtgttcagttgactggttttgtgtcctgtttgaacttgctgaatgtaaggcaggctactatgcgttataatctaatcacaatttgtcaatatggtcttggcaatcatctgtgcattactctggtttgcattaagcctgtgtgtgaacttactgtaaaacatgttttatttcaaggttctgcaaaattaattgggcaggttaattgtgtacctgaaacttaacaagcagtttttggaagggcagttccacgttactttacactaaatcctgggaatgaatgtctggagagacagggcttcttttcttggcagaatttccttgggtagtgggcggactgttctgatgcaagtgggtacactggcagaagcagcacaatctggaggactaacatgagtcagcagggccactagaattgacaccccctcaggggatcagggagaatctggtttttctttcaggctaagtagaaaaggaagaactgaagtgtctgtcaaagaactcatggggagtggggggtccttcagggcactgtggcacttgggaggtgagtctcagaagactgcctgaggagagtgccaggctgcaggtgctcttggtaggggctgaagcttttctttctgctttgcagaataatttcaaaagcctttcccaaggagagaatgcaccttttatatctgaggtcttaagtggtgcccatattgctgttgaaggcaaggatgggcctgtacaaagcagccttggaccaggagggaaaaccccaaggctctgcagcctccctgctcccctccgtttaaggctgtggtcagggagggatgggcagggtgccagccgcatggaggcagcagagacacccgtgttccagctggggcaaggggaactgatatgtgggctgtgggctgttccactaggcgtggccacctctgcacatgggccttggcacttaggaaatatgggtgctgctgcattgggaccttgtgtgggtgcagagcaggatggctgctgcgtggagggtaattttgtcccctggagagtgattggtgaccctcttccctgctgctgctgtttgcaggctcctggcctatactacctctgacgccctgatcctgagttcctctgccctcctctgctgccagcagcgctgttggtggcctcaccctcctccagtacccaggcaccaaagatggcaccaccatcctcctgcttgtaccacagggtgctgctccctgggccaactcctgtgaacttgctcacttcccatggagaccgaggccagggcctgcccctctgaggcccctgttttgtggtcctgctgcctctgctgtgctgcgttcaggaggttgtccactgctcgacgtgggtcaccatgcagcccttgctgttcccacaatttaacagaaaaggaaactgaacggatgagtaaggctgcccagggtcactcagctggaaaagagtagagctggactcaaacccgggactgtctgtctctggtgcctgagttgggaagacgctgttgatgtccccttctgcctcgctttgagcttcctcctccgtgggccctccccctactctagagaaactagtccattccctcatgttccaccttgtgctcagtaaaccctgtcactccacagcagggtttttgagacagtctcgctgtgtcacccaggtggagtgcagtggggcgatctcagctcactgcaacctctgccttccaggctcaagcaattctcctgccttagcctcctgcgtagctgagactacaggcatgtgccaccatggctggctaatttttatatttttagtagagatggggtttcaccatgatggccaggctggtctcgaactccagaccccaggtgatccgcctgccttggcctcccaaagtgctgggaatacaggtgtgagcccctgcgcccggctcacagcagggttcttgataggccaccagtgaatcccatgccaccgaatctggcattcatttcacagcctcatctcagttctcactcagcagagccctcttgcctgtcctgccacccaggctactaatgttctggttcattctctgctgacagttagctgtggctgtcctcagcctcagtcctgggtctccccaagcagtcattagcatcaccttgactgatttccagggaacacttcaaccaccccttacctctgagctccagccccgagacactgccttctctctgcatttgttgatctctgtgcagcagtgcccacatcctcatcccagcttactgccgtctcaccaccttcaggttgtgaggtgcccataaactctgctgttaccattgccacttccctgtcttagcagctgtccctttcagtctgccctccactagtggccatgaagggggctgtgaccgtggtccaggtgagaaaggaaggcctgaactaagatgggaggtgggtggccagaatggagaggggagaagtggatggccagaatggagagatgcttagagggctgtgttgggaagtggtgactggatacaggggagggaggagagatacaagagggcacctgggctcatttgtggactacgtgattttgagactccaaataagcactgggtatttgggttggagatacagagctgagaatgatatgcatgtaggtgggcaaagcaagggggatttcatgagttctaaggtagggtgagaaaaataaccgagagttgagcagtgacggaggaagctgcaaagaaaacgactgctcagggagaggctggccaggggcctgtggctcaggggactgagaagaggagctctctaggcatctgaattgaggttgcccacaattggttgcaagatcgtggctggccttgatggaagctgggaagccactcggtcctagtgaggggtggtgaggagagcagcaacggccacacaggaaggctttggacgttttttctcctgacactagttatttccaggcctgggatatagctaggggcttggggtgggggcaactctttgcagggtggtgtggcctgtggaggaaacaggctcagttccactactttggccaggtgcaatggctcatgcctgtaatcccagcactttggaaggccaaggcgggtggatcacctgaggtcaggagttcaagaccagcctggacaacatggtgaaaccccgtctctactgaaaatacaaaaataattagccgggaatggtggtgcgtgcctgtaatcccaggtactcgagaggctgaggcagacagttgcttgaacctgggaggcagaggttgctgcagtgagccgagattgctgcactgcactccagcctgggtgacagcaagactgtctcaaaaaaaaaaaaaaaaaaaaatccgctatttcaggtcaccctggtgctggcgttcacgtggaagactgcttatctgtatccagctgtttgcagagctcagggaggccagggggcttcagactccactgtactctgcattccaggattctctgttctctggctgtggtggcctgacacactcttcaccactgaccccacccccgcttgcacactatgccacaggaagggcaggggcttccatcacaatcactcagtactagttaccagctctgatagaattactcaccttgagtttccaagtcttgctgaaggtgcttgcgtaagtggcacatggatgttccctctgttcaaaggcatatgcacaacactatttttcaaaatttgcttttatttacacgtttgagtcaattacatgcatgttttatttttgaggagtgattagcaaaatgcattaaaattttaaaatagcaattaaatatacaaaaatatagcttacaaaaaactgcgaatgtttaaaaatattctgctgcagaatttttagtgtacaaagacgtctatgaaacctgaggttcagcatttcataaacctttttttgagggagttacacaatacctagtgaggaaacccgagggccaaactacaagacgaaaaagtgccccgttcctggcaatgatgtcagaagaccaagaggcgatagttaccagcaacactctaggaagaccagctgtcaccagaagggagttcctaacacttgccacacctgctcccccgaccgggggcctgggagggaagggcagatggagaggaacggtgtgcagtgggcgtgagatgcagatccaccaggcttgggactggcaaagggagctgagaagagagttcccccaaagcacaaacaagtctgctgacactggtggggcccttacagtcacagaagtaaggactggatggtaagccaaaggtgctgatgcttggtcaaaaagtggagtacatctttgcatcttgtaacaatttgggctctacagctgaattggcaaagtaaggtttactacacaagcccctctttttcttctgatatccccactcaaatggaagcacactccccagcacatggggatcccttattaatctttactaaagaaccgtgaaccagcattttccagttatcaactggatatttaggcatgaatctggacatgtccatctgcttaagaaatctgcttaagaaatctgtaacagctacaggaaaagacacacccagggccagagattctacaaatgccagaagagtggatgtgatagagaattttttctcaagttttgggttagggcaccagttgcaattttaatccaggggaggatctgggctgctgctgtagggggcaagtacaccagggaggtgggtgtggacagaggcactgggcagctgctgggaagcgaggcacaagtctgtgcccctactcccagggctgcctggaggaagcagctctaactttcatcagcggggacaaaaatgaacttaaactaaaaaaattattggccgggcgcagtggctcacgcctgtaatcccagcactttgggaggtcaaggcaggtgcatcacgaggtcaggagatcgagaccatcctggctaacacggtgaaactccgtctgtactaaaaatacaaaaaattagccgagcgtggtggcgggcacctgttgtcccagctcccgaggcgggagaatggcgtgaacctgggaggcggagcttgcagtgggccaagatcgtgccactgcattccagcctgggtgacagagcgagactccgtctcaaaaaaaaaaaaaaaaaaaaaaaaaaaaaaaattgttggggtaatttctgttgtcaaatggaaaacaaggcataaagggaaaattctgtaggaagcattttcttttcttgtgtgtttttttgagacggagtctcgctctgttgcccaggctggagtgcagtggggatcttggctcactgcaacttctgtctcccgggttcaatcaattctcctgtcccagcctcctgagtggctgggattacaggcatgcgtcaccacacccggcaaatttttgtatttttagtagagggggtttcaccatattggtcaggctggtcttgaactcttgacctaaggtgatccgcctgcctcggcctcccaaagtgctgggatgttgggattacaggcgtgagccatcgcgcccgaccagaagcattttcttttcaaagtgtgtgcacagagtgaggaggccagcctgggcaacatagtgagttgagacctgtctctacaaaaaaataattacgaaaattagccaggtgtgctggtgtgcacctgtagacgcagctacagactgaggcgggaggatcacttgagtccaggaagttgaggctgcagtgagctacaatggtgccactgcactccagtctgggtaacaagaccctgtctcaacaacaacgaaaagttgggagggaaagggagtagctccatgaactgacgctggacattcaggcatatccacatgagactcactgtgcacttgctcagtagctaagatgtctgccccacaaaatagaagccttcagttgctgctgctcaaactcctgcatcaaagacacaagagcttgcctaagtgaccacaacagttgcagccacacatcaccactggtcctcacttggaactggccaaggtaggggaggggccagcagctgtccaggcacctgcagaggctgctcagagctgggagaggcctgtgccactgctgtcagctacagagcctgatcttgagcatcctgtcgcagatagaaagtcaatcagaaaaatctggttgtgctcttggattagctgggcatttggggtaagggagggactgcagattctgatttgtacagaaaactaaaatttcagtatgttgcaataaaatgaaaatatgtcttaaaaaaaaaaaaaa

SEQ ID NO: 373 - DNA, 4695 bp, Homo sapiens
attgagctcaaagcttagcagcttcaatgttgttgttaggcataaacagcttgcaaatttcaattttttttctctcctcacttttgaactagatttgggcaatggaggtgatgacagcattttagaagacagaacaggaattctaggtgtttaggcacgttgaagagaaacttgctagaggtgatgaagtggaaagaaaaagacaattcactatagggatcaacattattgcagttctgcaaaggatattttcttttaaaacatccatatctcttctttgccatggaaactacacccaatctacctgaacctgcggcacccctctgatgacccatttggattctctgatttcactgccaagattctcagttctccaaaatacttatcattcaggttgaataaaccagttctacagactgcttcttccatgcatttcccaatgatgctagctgcccttaaaattctttcagatttggaactgtatctgtatggaaacaacagagttttcttgaagtacaactaaggacaggtcaccactaggcactaacatcgctgacttgcatgattatggagatggtctatctgatgctgaaaatgtctctagttttttgacaacggctaaataaccatgggatcaagtggccttgggaaagcagcaacattagatgaactgctgtgcacttgcattgagatgtttgatgacaatggagagctggataatagttatttgccaagaatagttctactgatgcaccgatggtatttatcttccactgaattggcagaaaaacttctctgcatgtatcgaaatgccactggagaaagctgcaatgaatttcgattaaagatctgctacttcatgaggtactggattctgaagtttcctgcagagtttaatttggatcttggtttgattcgtatgactgaggaatttcgggaagtagctagtcaactaggatatgaaaaacacgtcagcctcatcgacatatccagcattccttcctatgactggatgagaagagtcacacagaggaaaaaagtatccaagaagggaaaagcctgtctgctgtttgaccatctggagcccattgaattggctgagcacctcacttttctggagcataaatcttttagaaggatctcattcactgattaccaaagctatgtcatccatggctgcctggagaataatccaaccttggaaagatcgattgctttatttaatggaatctctaagtgggtccagttgatggttcttagcaaaccaaccccccagcaaagggcagaagtcatcacaaagtttatcaatgttgcaaagaagctccttcagctcaaaaattttaacaccctgatggcagtggtgggaggcctcagtcatagttccatttcacgcctcaaagagacccattctcatctttcttcagaagttacaaagaactggaatgaaatgacagagttggtctcctccaacggcaattactgcaattaccgcaaggcctttgccgactgcgatggcttcaaaatccccatccttggagtacacttgaaagacttgatagctgtccatgtcattttcccagactggacagaggagaacaaagtgaacattgtgaaaatgcaccagctctccgttaccctgagtgaactagtctccctgcagaatgcctctcaccacttagaacccaacatggatttgatcaacctgctcacgctttccctggacctctatcacactgaagatgatatttacaaactgtcactggtgctggagcctagaaattctaaatcgcagcctacctcccctacgacgcccaacaagcctgtggtacccctggagtgggcattaggggtgatgccaaagccagaccccacggtcatcaacaagcacataaggaaattagtggagtctgtatttagaaactatgatcacgaccatgatgggtacatttcccaagaggactttgaaagtatagctgccaattttcccttcttggattccttctgtgttctggacaaagatcaggatggcctaattagtaaagatgaaatgatggcttacttcctgagagctaaatcccaactacactgtaaaatgggaccaggatttatccataattttcaggagatgacctatctcaagccaaccttctgcgaacactgtgcgggatttctctggggcataatcaagcaaggatacaaatgcaaagactgtggagccaattgtcacaaacagtgcaaagacctcctggttctggcctgcaggagatttgcccgggcgccctccttgagcagtggtcatgggtcactgcctggaagcccctcgctgcccccagcgcaggatgaggtgtttgagttccctggagtcactgctggacacagggatttagacagcagagccatcacactggttacaggctcttctcgcaagatctctgtgaggctacagagggccaccaccagccaggccacccagactgaacctgtctggtcagaggctggctggggggactcggggtcccacaccttccctaaaatgaaatccaagttccatgacaaagcagcaaaggacaaaggctttgccaaatgggaaaatgagaagcccagggtgcatgctggtgtggatgttgtagaccggggcacggagtttgaacttgaccaggatgaaggagaagagaccagacaggatggtgaggatggctgacttcaggctgcggaaactgaaggcaataatgttggcttttggaaggggcaagacgagaaactctgaagaaagctctgactctcaggaagttatctggaaagatacctggatgtttactgccttgggacactgtgggatctccatgtttggactatgggacagagaattgaccctaactaactaactatgaactatttatttcctcctcccctacccctagttaagtgccacaaagactgtgttatgtagtcagtacttttttctcatgtatctttctctagaccatttatatacgggtgaaatgaaagcttttttgcatgtacttgatactcagtctgtaaactcagacttcgctttttttgtgagactatcctttcaatatttttataaacttttgtgtgtgctgtggcagggaacagttaacaaggagtttatttagaggggtttttttcattttttgtttttcttgttttgttttgttttgttttgttcttcttggtgtgctttttggatgggaccagaacttaacattttcctgaggactaggaagctcatcagacactggaatgcagtgattcttctaatgatggtcaactgcaaggagaaactgtttacatccttcccactacacagttgctatgatatgtaacaagtcacacatgtatatatcacacaagtcttaccaattctgcgtcactaggaagctatagcatggtcgtgaaagctctcctaatacttacttaaatagccatggaagaaaattatgcttgtcccttctgactgggttaagccatctttcttaagattcctgaagtagaaatagcaattaagaaattaattcaagttttgacggttaacatttagcagaaaaacaaaccattgaataagctactaggtgaaatgcaaaacaaccatcaatttttttaaactcaataattttgtgaaaaaaaaaaccaccaccaaacttttggttgtaaaagagaacccttgttcccttcctaagaaactgccttccacaattaaagaatactcatagaaagaaaataatcataaatcatatttgattaacatttcatttaagcttttaaaatatcaattttttaaatagctcccatttacccaaaataactagttatgggtctatttcttccatgattagaggagagagaacttgattcaagatactgaaaaatagagctgggactgagcctgtgaatgacaggaatgatctattaccaggtgactagtcggaaactacacagacgtgcactggtctgcatttgggggctaaagtgtatatattccatttaaaatggaatttgtttgtatttggggcagtcttcagtaaagcctttctcctttcttttctccattgaggacagttctgctcagcaaaattgttgagtacctgttctgggcaggtcccacgctatatgcacaaagttaagaaaaacttggtcttagcccttgggagctgacagcccatgggcattaaggcaaagtagttccagtgatttaaaatacggttccaaatacgctaaaaccaacttgtgccaaccagatttacagattggaaatactgcagatgatgtgaagttatcagttggaggagctgtgattaagctggataataagagaacgtgccatctgtaaagcactcagaaggcagccatccctagatgttggtttcatgtatattacactatctactactatccataaatgcaataatatgcatgttaacaacattaaaaacagcaaacagcaatctaagtacagaaaagctttttgtgtgtttaaaaaaattgaagaaaattcaggaagaaacgtgttaataaacattgtactgttcttttgcttctcaaaggaattattcacttgccactttggttatttttgagttttcgtacataggaagttttatattgccagccttcctgtgataaagatattaaatgtaacttgagtaaaaaataaaaaagaataactatgta

SEQ ID NO: 374 - DNA, 1384 bp, Homo sapiens
gagaacccagacgggcagagcctgggtaggagagcctggccccgctgtccccactgggtggagacaccatgcacttggtccacttgtgctcttcagccaggacaccagacatggtccaaaccgctgcagggctggctgcagcaactccctgacactcaggaaggcccaggctgggcaggcaatacctgctcccaacagccatgcatgccggctgccgctccaggactcccctgtccccaggaccaagatgacgcccaacagcactggcgaggtgcccagccccattcccaagggggctttggggctctccctggccctggcaagcctcatcatcaccgcgaacctgctcctagccctgggcatcgcctgggaccgccgcctgcgcagcccacctgctggctgcttcttcctgagcctactgctggctgggctgctcacgggtctggcattgcccacattgccagggctgtggaaccagagtcgccggggttactggtcctgcctcctcgtctacttggctcccaacttctccttcctctccctgcttgccaacctcttgctggtgcacggggagcgctacatggcagtcctgaggccactccagccccctgggagcattcggctggccctgctcctcacctgggctggtcccctgctctttgccagtctgcccgctctggggtggaaccactggacccctggtgccaactgcagctcccaggctatcttcccagccccctacctgtacctcgaagtctatgggctcctgctgcccgccgtgggtgctgctgccttcctctctgtccgcgtgctggccactgcccaccgccagctgcaggacatctgccggctggagcgggcagtgtgccgcgatgagccctccgccctggcccgggcccttacctggaggcaggcaagggcacaggctggagccatgctgctcttcgggctgtgctgggggccctacgtggccacactgctcctctcagtcctggcctatgagcagcgcccgccactggggcctgggacactgttgtccctcctctccctaggaagtgccagtgcagcggcagtgcccgtagccatggggctgggcgatcagcgctacacagccccctggagggcagccgcccaaaggtgcctgcaggggctgtggggaagagcctcccgggacagtcccggccccagcattgcctaccacccaagcagccaaagcagtgtcgacctggacttgaactaaaggaagggcctctgctgactcctaccagagcatccgtccagctcagccatccagcctgtctctaccgggccccacttctctggatcagagaccctgcctctgtttgaccccgcactgactgaataaagctcctctggccgttta

SEQ ID NO: 375 - DNA, 2850 bp, Homo sapiens
agcacaggagcacgtagcctgcaggtgtgggttgtacacaggcttccccctgctgagtcagttccccagatctcttcatcacttccccagatctctgggatcttcagctgagattgggccccagcacctggactcaaggcagtagcagaatcccatggtagccaggtgggtgaaggggagcgaggacgttctacctgccttgaagaagacacctgacctgcggagtgagtgaccagtgtttccagagcctggcaatggatgccattcacatcggcatgtccagcacccccctggtgaagcacactgctggggctgggctcaaggccaacagaccccgcgtcatgtccaagagtgggcacagcaacgtgagaattgacaaagtggatggcatatacctactctacctgcaagacctgtggaccacagttatcgacatgaagtggagatacaaactcaccctgttcgctgccacttttgtgatgacctggttcctttttggagtcatctactatgccatcgcgtttattcatggggacttagaacccggtgagcccatttcaaatcataccccctgcatcatgaaagtggactctctcactggggcgtttctcttttccctggaatcccagacaaccattggctatggagtccgttccatcacagaggaatgtcctcatgccatcttcctgttggttgctcagttggtcatcacgaccttgattgagatcttcatcaccggaaccttcctggccaaaatcgccagacccaaaaagcgggctgagaccatcaagttcagccactgtgcagtcatcaccaagcagaatgggaagctgtgcttggtgattcaggtagccaatatgaggaagagcctcttgattcagtgccagctctctggcaagctcctgcagacccacgtcaccaaggagggggagcggattctcctcaaccaagccactgtcaaattccacgtggactcctcctctgagagccccttcctcattctgcccatgacattctaccatgtgctggatgagacgagccccctgagagacctcacaccccaaaacctaaaggagaaggagtttgagcttgtggtcctcctcaatgccactgtggaatccaccagcgctgtctgccagagccgaacatcttatatcccagaggaaatctactggggttttgagtttgtgcctgtggtatctctctccaaaaatggaaaatatgtggctgatttcagtcagtttgaacagattcggaaaagcccagattgcacattttactgtgcagattctgagaaacagcaactcgaggagaagtacaggcaggaggatcagagggaaagagaactgaggacacttttattacaacagagcaatgtctgatcacaggggcgccatccaggtttaaccctgcaagctgtttccacatcagaactcccttcaaacacaaagattgctgtgaaaacgaaaatgtgtagacgcactctcaaaaactgcacggacatacaaaatcaatcttttcctttgatcttgtggctaaaccagcatttctgtgtttgagagatttcctgttaggtgcttcgtctgaaagtgaactctcataattcaaattgtataaaataaagctacatttctaagagcttggtgtagggcaattggaataatgtcctgttagataaacagacatttagcaatcctgacattaaaaggaaatgtatttctatacaagattattagctgtaatacaagatatttatttaaccaatgaccttatggctgagagttgaattgtggttcagtattcattgatctcactgctttaaaacatgctctttttgttcaagcaggaaaaatattatatctaattatgtctatgtggtaatacctaaaaagaggtagagagactctatgttcacaaaatatagtaatttcatttttacctttcttcagtggactgaattgtatggaaggaaattgatcagatctgtaattcacaactgtggaaacctacacaaatggggctgatgccattgtttcctctattttattttatttatttttgaatccactatctctttccattcaaaatatttccattcaaaatgtggttcacagacccgccacatcagcaccatccgagagcttattagtaatgtgtagattctcatgtcccagccagacttacagaattggggtctgtatcttaacaagaaccccagatgatttgtgtacaaatgaaagttcgaaagctgtgctctggacagtgttctcaaagcaactttctgaagccgtgtggaaaactgactctgtgtgggtcccgtatccctgtggcatccagacctggcctctcttcatttcattattattggccaatatttctttcagccatttcatttcttatctattaaaatggcttgcccataaaggaactgcataggattatcccctgacattccaagagcaaaataaagctcttgagagtaattgttgtctcagtcatgcttgctgattacagttagcacaaaagaaaaattcagctgcctgacaatacaggaaatgttctcagatgctgatgtttgtaaggtccggtggggccatgaggaagaagaggagctgaaggtaagaaactcataaacaagatgactctttgatgcatgaacaagatttgaaaatctcaagcctgtaaagaatacccctgctatttaaataaagctcataccaagaggtaacattttgccccgggccaaattcaggggtctagtgccctgcattcctttgaggcaaaaaataaatgggctatgactggttaaatgtccaaaaaaaaaaaaaaaaaaaaaaaaaaaaaaaaaaa

SEQ ID NO: 376 - DNA, 2946 bp, Homo sapiens
gcagagacgccatgtaccggctcatgtcagcagtgactgcccgggctgccgcccccgggggcttggcctcaagctgcggacgacgcggggtccatcagcgcgccgggctgccgcctctcggccacggctgggtcgggggcctcgggctggggctggggctggcgctcggggtgaagctggcaggtgggctgaggggcgcggccccggcgcagtcccccgcggcccccgaccctgaggcgtcgcctctggccgagccgccacaggagcagtccctcgccccgtggtctccgcagaccccggcgccgccctgctccaggtgcttcgccagagccatcgagagcagccgcgacctgctgcacaggatcaaggatgaggtgggcgcaccgggcatagtggttggagtttctgtagatggaaaagaagtctggtcagaaggtttaggttatgctgatgttgagaaccgtgtaccatgtaaaccagagacagttatgcgaattgctagcatcagcaaaagtctcaccatggttgctcttgccaaattgtgggaagcagggaaactggatcttgatattccagtacaacattatgttcccgaattcccagaaaaagaatatgaaggtgaaaaggtttctgtcacaacaagattactgatttcccatttaagtggaattcgtcattatgaaaaggacataaaaaaggtgaaagaagagaaagcttataaagccttgaagatgatgaaagagaatgttgcatttgagcaagaaaaagaaggcaaaagtaatgaaaagaatgattttactaaatttaaaacagagcaggagaatgaagccaaatgccggaattcaaaacctggcaagaaaaagaatgattttgaacaaggcgaattatatttgagagaaaagtttgaaaattcaattgaatccctaagattatttaaaaatgatcctttgttcttcaaacctggtagtcagtttttgtattcaacttttggctataccctactggcagccatagtagagagagcttcaggatgtaaatatttggactatatgcagaaaatattccatgacttggatatgctgacgactgtgcaggaagaaaacgagccagtgatttacaatagagcaaggtaaatgaataccttctgctgtgtctagctatatcgcatcttaacactattttattaattaaaagtcaaattttctttgtttccattccaaaatcaacctgccacattttgggagcttttctacatgtctgttttctcatctgtaaagtgaaggaagtaaaacatgtttataaagtacactaagaccctttgatgaaagatagcaataatattaataattcaaacatgaataactaaaccaaaattgcacccaccatgagcatctgtaatttgctctttaaccattccttttttaggttttaactaatactttgtttacgtgttattagtttttaattgttttcatactgttttgaaataattttatacttatagaaaagttgcaagagtagtacaaaggattcacatatcctctttactcagattcccttaatgttagtttaccgcatttgcattacctttctgtctacatatgtgtttgtttctgaaccatttggaaataagttgtagacgtgatacccctttacctataaatatttacatgtgtattttctaaaaacaaggacattcagggccgggtgcagtggctcacgcctgtaatcccaacactttggaaggccgaggtgggtggatcacctgaggtcaggagttcaagaccagcctggccaatgtggtgaaatcaaccctctctctactaaaaatgcaaaaattagccaggtgtggtggcgggtgcctataatcccagccacgcgggaggctgaggcaggagaatcgcttgaacccaggaggtggagttgcagtaagccaagatcgtgcccctgcacttcaggctgggcgaaagagtgagactccatgtcaaaaaaggaaaaaaaaaaaaaaaaaaaggacatttgggaaattaacatagatacaatgcttttattaaatctacagaccttactcaaattttgccagttgttccaataatgtcctttatagcaaaagagcagaaaaacttttttttctggtctaggatctaatccatgatctcacattgcatttacttgtcatatctatcagaagtcacttgacatcagtttgtcccattattgctgatggtattttaatcactttttgaggtggtgcctgtcaggttattgtaaagttactatttttactttataattaacaagtatatttggaggagataatttgagatgatgtaaaaatcctctttctcatcaaactttctactagttttagcatctatcagtgattcatgactgaatcagttattacagtgatggttgtcaaatggtgattttctaattccatcatccattctgtatttatcagttggcattctattataagaaggtgcgggccggggcggtggctcacgcctgtaatcccatcactttgggaggctgaggtgggcggatcacatgagaccaagtttgagaccagcctggccaacatggcgaaaccccatctctactgaaaatacaaaaaatcagccgggcatggtggcatacacttgtaatctcggctgctcgggagtctgaggcaggagaatctcttgaacccaggaggcagaggttgcagtgagccaagatcatgccactgcactccagcctgggcgacaaagtgagactccatctcagaaaaaaaagtgctttcccttctctcttatttatttattcataccagtatgcactcatggattcttattttagtcaatgagttataatctgtcactgtcattatttaatatgttgcttttaaaatagtatatgaaataataaaactgtaacagtaaatggttattagattgctta

SEQ ID NO: 377 - DNA, 951 bp, Homo sapiens
aggaattacatcccagacagagctcaaaactgacagaaagagtcaaagccaggacacagtctgagatccagaagaggggactgaaaagaacagagactccagacaagacccaaacagaccctgggtgacagcctcagagtgtttcttctgctgacaaagaccagagatcaggaatgaaactagacatgactggggactgcacgccagtgctggtgctgatggccgcagtgctgaccgtgactggagcagttcctgtcgccaggctccacggggctctcccggatgcaaggggctgccacatagcccagttcaagtccctgtctccacaggagctgcaggcctttaagagggccaaagatgccttagaagagtcgcttctgctgaaggactgcaggtgccactcccgcctcttccccaggacctgggacctgaggcagctgcaggtgagggagcgccccatggctttggaggctgagctggccctgacgctgaaggttctggaggccaccgctgacactgacccagccctggtggacgtcttggaccagccccttcacaccctgcaccatatcctctcccagttccgggcctgtatccagcctcagcccacggcagggcccaggacccggggccgcctccaccattggctgtaccggctccaggaggccccaaaaaaggagtcccctggctgcctcgaggcctctgtcaccttcaacctcttccgcctcctcacgcgagacctgaattgtgttgccagtggggacctgtgtgtctgaccctcccaccagtcatgcaacctgagattttatttataaattagccacttgtcttaatttattgccacccagtcgctatttatgtatttgtgtgtgtaaatccaactcacctccaggaaaatgtttatttttctactttttataacccttgttgaaataaacaaaggaaaagaca

SEQ ID NO: 378 - DNA, 775 bp, Homo sapiens
agttgcgatttagccatggctgcagcttggaccgtggtgctggtgactttggtgctaggcttggccgtggcaggccctgtccccacttccaagcccaccacaactgggaagggctgccacattggcaggttcaaatctctgtcaccacaggagctagcgagcttcaagaaggccagggacgccttggaagagtcactcaagctgaaaaactggagttgcagctctcctgtcttccccgggaattgggacctgaggcttctccaggtgagggagcgccctgtggccttggaggctgagctggccctgacgctgaaggtcctggaggccgctgctggcccagccctggaggacgtcctagaccagccccttcacaccctgcaccacatcctctcccagctccaggcctgtatccagcctcagcccacagcagggcccaggccccggggccgcctccaccactggctgcaccggctccaggaggcccccaaaaaggagtccgctggctgcctggaggcatctgtcaccttcaacctcttccgcctcctcacgcgagacctcaaatatgtggccgatgggaacctgtgtctgagaacgtcaacccaccctgagtccacctgacaccccacaccttatttatgcgctgagccctactccttccttaatttatttcctctcaccctttatttatgaagctgcagccctgactgagacatagggctgagtttattgttttacttttatacattatgcacaaataaacaacaaggaattggaa

SEQ ID NO: 379 - DNA, 1962 bp, Homo sapiens
gactccgggtggcaggcgcccgggggaatcccagctgactcgctcactgccttcgaagtccggcgccccccgggagggaactgggtggccgcaccctcccggctgcggtggctgtcgccccccaccctgcagccaggactcgatggaggtacagagctcggcttctttgccttgggaggggagtggtggtggttgaaagggcgatggaattttccccgaaagcctacgcccagggcccctcccagctccagcgttaccctccggtctatcctactggccgagctgccccgccttctcatggggaaaacttagccgcaacttcaatttttggtttttcctttaatgacacttctgaggctctcctagccatcctcccgcttccggaggagcgcagatcgcaggtccctttgcccctggcgtgcgactccctactgcgctgcgctcttacggcgttccaggctgctggctagcgcaaggcgggccgggcaccccgcgctccgctgggagggtgagggacgcgcgtctggcggccccagccaagctgcgggtttctgagaagacgctgtcccgcagccctgagggctgagttctgcacccagtcaagctcaggaaggccaagaaaagaatccattccaatatatggccatgtggctctttggagcaatgttccatcatgttccatgctgctgacgtcacatggagcacagaaatcaatgttagcagatagccagcccatacaagatcgtattgtattgtaggaggcattgtggatggatggctgctggaaaccccttgccatagccagctcttcttcaatacttaaggatttaccgtggctttgagtaatgagaatttcgaaaccacatttgagaagtatttccatccagtgctacttgtgtttacttctaaacagtcattttctaactgaagctggcattcatgtcttcattttgggctgtttcagtgcagggcttcctaaaacagaagccaactgggtgaatgtaataagtgatttgaaaaaaattgaagatcttattcaatctatgcatattgatgctactttatatacggaaagtgatgttcaccccagttgcaaagtaacagcaatgaagtgctttctcttggagttacaagttatttcacttgagtccggagatgcaagtattcatgatacagtagaaaatctgatcatcctagcaaacaacagtttgtcttctaatgggaatgtaacagaatctggatgcaaagaatgtgaggaactggaggaaaaaaatattaaagaatttttgcagagttttgtacatattgtccaaatgttcatcaacacttcttgattgcaattgattctttttaaagtgtttctgttattaacaaacatcactctgctgcttagacataacaaaacactcggcatttcaaatgtgctgtcaaaacaagtttttctgtcaagaagatgatcagaccttggatcagatgaactcttagaaatgaaggcagaaaaatgtcattgagtaatatagtgactatgaacttctctcagacttactttactcatttttttaatttattattgaaattgtacatatttgtggaataatgtaaaatgttgaataaaaatatgtacaagtgttgttttttaagttgcactgatattttacctcttattgcaaaatagcatttgtttaagggtgatagtcaaattatgtattggtggggctgggtaccaatgctgcaggtcaacagctatgctggtaggctcctgccagtgtggaaccactgactactggctctcattgacttccttactaagcatagcaaacagaggaagaatttgttatcagtaagaaaaagaagaactatatgtgaatcctcttctttatactgtaatttagttattgatgtataaagcaactgttatgaaataaagaaattgcaataactggcaaaaaaaaaaaaaaaaaa

SEQ ID NO: 380 - DNA, 3189 bp, Homo sapiens
gaagaggaggcttcatggctgaggaggtcgcagcgccatgaagtccctgtctctgctcctcgctgtggctttgggcctggcgaccgccgtctcagcaggacccgcggtgatcgagtgttggttcgtggaggatgcgagcggaaagggcctggccaagagacccggtgcactgctgttgcgccagggaccgggggaaccgccgccccggccggacctcgaccctgagctctatctcagtgtacacgtggtactgactgtcctcacccacacccctgcccctcgagtgagactgggacaagatgctctgctggacttgagctttgcctacatgccccccacctccgaggccgcctcatctctggctccgggtccccctccctttgggctagagtggcgacgccagcacctgggtaagggacatctgctcctggctgcaactcctgggctgaatggccagatgccagcagcccaagaaggggccgtggcatttgctgcttgggatgatgatgagccatggggcccatggaccggaaatgggaccttctggctgcctacagttcaaccctttcaggagggcacctatctggccaccatacacctgccatacctgcaaggacaggtcaccctggagcttgctgtgtacaaaccccccaaagtgtccctgatgccagcaacccttgcacgggccgccccaggggaggcacccccggaattgctctgccttgtgtcccacttctacccttctgggggcctggaggtggagtgggaactccggggtggcccagggggccgctctcagaaggccgaggggcagaggtggctctcggccctgcgccaccattccgatggctctgtcagcctctctgggcacttgcagccgcccccagtcaccactgagcagcatggggcacgctatgcctgtcgaattcaccatcccagcctgcctgcctcggggcgcagcgctgaggtcaccctggaggtagcaggtctttcagggccctcccttgaggacagcgtaggccttttcctgtctgcctttcttctgcttgggctcttcaaggcactgggctgggctgctgtctacctgtccacctgcaaggattcaaagaagaaagcagagtgagggcactcactgccatcctgtggaagccaccatcatctctggcccaagcttctgtagtagctccctaaaataataccctatcatctgctcctaatccctccaatctctctccactgagtggctggaatgcttttttttttttctttcacttatataagggataatttttcttttttttttttttttgagacggagtctcactcttccgcccaggctgcagtgcagtggcatgatcttggcttactgcaacctccgcctcctgggttcaagcaattctgtggcttcagcctccggagtagctgggattacaggcacatgccaccacacccagtgaatttttgtatttttagtagagacggggtttcaccatgttggccaggctggtcttgaattcctgacctcaggtgatctgcccacctcagcctcccaaagtgctgggattacaggcgtgagccaccacaccaggcccgagaaatgcttttttaaaaaacacacatcttatggcattcaccttcttggagctctaggacagtggttctcaaaatttttttctctcaggacctcttaaaaatcatcaaggaccccaaaaagcttttgggtatgtgggttatagctatcaatatttatggtactagaacttaaaagtgagaaaaatttaaaacacgagaatacataggcacacattctattcatcgtgggaaccatggtgtcaatacatatcatgtagcttctgaaaaactccactgtacacttatagaatgaagaaggcaaaaaacttttttttttttttttttgagacggagtctcgctctgtcgcccaggctggagtgcagtggcgcgatctcggctcactgcaagctccgcctctcgggttcacgccattctcctgcctcagcctcccaagtagctcggactacaggcgtcctccaccatgcctggctaatattttgtattttttagtagagacggggtttcaccgtgttagccaggatggtctcgatctcctaacctggtgatccgcccgcctcggcctcccaaagtattgggattacccgcgtgagccaccgcgcccggctgcaaataatctttctttttttctgagacagagtctcgctctgttgcccaggctggagtgcagtggcacgatctcggctcacggcacgctccgcctcccgggttcacgccattctcctgcctcagcttcccgagtagctgggactacaggggcccgccaccacgcccggctaactttttgtgtttttagtagagacggggtttcaccgtgttagccaggatggtctcgatctcctgaccttgtgatctgcccgcctcggcctcccaaagtgctgggattacaggcgtgagccaccgcgcccggcggcgaaacacgatattgtactaacatcttaattttgttataaaatctcacaaaccccctgacatagtctcagagatctgtagggccgaggttacatttggagaacccgtactctagggccaaatccattcttcttgccctggctcacttgtcccccccaccgccccgcgctggagccactgcctagttcttcagccctagatggtgctcgccagacctcctctcaatgctcatcacacacagggctattcctttcctccaatgaaccaaacgcctcccgcccacctccaggtcccagtcctctgttccctttgcctggtccacccttgccctccctgggtcgcagacgaggtcggcctcgtcattccccgcagaccgccgcgcgtccctcttgtgcggttcaccacagttgtatttaagtgatcgtgtgagtcgtcgttaaatgcctgtctccccgcggatcatgggctcctcgaggacagggactggcctgtctgtccactgctgtaaccccgcgccggcatagggacctaaggcccactggagggcgctcatcaagtagctgctggatgttgacgaaggaagcggcggcgcagctcagggatctccgagtcaggacggtcggccagacccacggggtaacgggtctaatcgtgtaggaataaagctgtattccagtgcttccaaa

SEQ ID NO: 381 - DNA, 497 bp, Homo sapiens
ccacattcttctccttgtaaaagaagctgtaactgcaattttagccgtaatgtcaggacgcggaaagcagggaggcaaggcccgcgctaaggccaagtcgcgctcgtcccgcgctggtctccagttcccggtggggcgagtgcaccgcttgctgcgcaaaggcaactacgcggagcgggtcggggcaggcgccccggtgtacctggcggcggtcctcgagtacctgaccgcggaaattctggagctggcgggcaacgcggctcgggacaacaagaagacgcgcatcatccctcgccatctgcaactagccgtgaggaatgacgaagagctcaacaagttactcgggggtgtcaccattgcccagggcggcgtcttgcccaatatccaggctgtcctgttgcccaagaaaacggagagtcacaagcctggcaagaacaagtaattaagaggcttgacaccatactcattcaccccaaaggctcttttaagagccacca

SEQ ID NO: 382 - DNA, 4185 bp, Homo sapiens
ggctttgctcagagcttgtagcggcgccacaatctctgtcctctcaggaacaggaactggcttgacgtccttttcctgccctatccaagcccctgttcttgcagcccttctgaagctcagcctggcaccggccccggcgccccagcccctggccaagcctctgctgtcatttctcctccctcctctcagtctgcagctgcgggacgggccgggctcctcagtttctgctgtgttgtgaccccacgaggcgctcagcacccagggaaggcgcgtgtgtccccgatgctggctcctccctgagccccgacggctctcgaggttctgagcctgtggcctgcacagggaacttcctctccgactgcatttatgcctctgtggatgtgaaggctatttctagaaatctcttcctttgcagaaacacccgaaaccctcctgccaggaagaccagggcctgggaagagggtcgctctccggccattctcccctcaccctcctcaccttcctcacatcctgtgccctgggggaccagcagctgcttccacccagaacaagcgggagcctgtgtcaggaaagcatgtcagagcagagctgccagatgtccgaactgcggctcctcctcctgggaaaatgccgctcgggaaaaagtgccacaggaaatgccattctgggcaaacatgtgttcaagtccaagttcagtgatcagacagtgatcaaaatgtgccagagagagagttgggtcctgagagaaaggaaggttgtggtaattgacacccctgaccttttctcctcaatagcttgtgctgaagacaagcaacgcaacatccaacactgcttggagctctctgctcccagcctccatgctctgctcttggtaattgccatcggccatttcacaagggaggatgaggaaacagccaagggcatccaacaagtgtttggagctgaagccaggaggcacatcattattgtcttcactcggaaggatgatttgggggatgacttgctgcaagatttcattgaaaaaaacaaacctctcaagcagttggttcaagactatgagggccgatactgcattttcaacaacaagaccaatagtaaggatgagcagatcacccaggtgttggagctccttcgcaaggttgagtctttggtgaatacgaacggaggaccctatcatgtgaacttcaaaactgaaggcagcaggtttcaagattgtgtgaatgaagctgcatctcaagagggagacaagccacagggcccaagggaaaggcagctgcagtccacaggacccgagcagaatccggggacatcagaactgacagtcctccttgtggggaaacgcggtgctggaaaaagtgcagcaggaaacagcattctggggaggcaggcctttcagaccggatttagtgagcagtcagtaacccagagcttcttgtctgagagcagaagctggagaaaaaagaaagtttcgatcattgatgctccggacatctcatctttaaagaacattgactcagaagttagaaaacacatctgtacaggcccccatgccttcctgctggtgacaccactgggcttttacactaagaatgatgaggcagtgctgagcaccatccaaaacaattttggagaaaaattctttgagtacatgatcatacttcttaccaggaaagaagatttaggggatcaggatctagatacgttcttaagaaacagcaataaagctctctatggtctcatccagaagtgtaaaaacagatatagtgccttcaactaccgggcaacaggagaagaagagcaaaggcaggcggacgagctcctggaaaaaattgagagcatggtgcatcagaatgggaacaagcattgtgttttcagagaaaaagaaaccctgaacattgtccttgtggggagaagcgggactgggaagagtgcgaccgggaactctatcctggggagcctcgtcttcacctctcggctccgggcccagccagtcaccaagaccagccagagtggcaggaggacatgggacggacaggaggtggtggttgtggacactccttccttcaaccagatgctggatgtcgaaaaggacccatcccggttagaagaggaggtcaagcgctgtttgtcctgctgtgaaaaaggggacacattttttgtcctggtgttccagctgggacgattcactgaagaggacaaaacagctgtggcgaaactggaggccatctttggagcagactttacgaaatacgcgattatgctgttcacccggaaggaagacctaggggcggggaatttggaagacttcatgaagaactcagataacaaagcccttcggcgcatttttaaaaagtgtgggcggcgagtttgtgcttttaacaacaaagaaacaggccaggcccaggaaacccaggtgaaagctcttttaacaaaggtcaatgatctgagaaaagaaagtgggtggtccgggtatccccatacacaggagaacgtcagcaaactaattaaaaatgtccaggaaatgtcccaagccgaaaaactccttaaaaatttaataggtattttacaataggtagccgaagtgcctggggtctcttcaattagagacaccctcaggttggggggaggggcggggcatggtacaacctgtgggaagggaagcgggttcatggctttgagggcctgagaggcaaatgcatcccgccttgtgatgtatcagctatttgtagataaataaattgcaggtgggggcgaatagtagggtattataaaggagaaagaagatacaaggtggggaaatctggaaaaagatttcagacattaggctgataataagtggtagaatcaagtcacaagaatcacctcacttgtgtaggtaggttggaatcaggatagacactgtgatcaaggctgaggccacctgggatgagaatatagatagtcgtacaacaacccaggggatccagatacatgagaccagggcagcgttcagcacactcctgggcatggcggaagcaggaagcagactccagagggcctccctgttgtccagggccgttggctccctgagctctcctgtctcctttgggatgcgacttagggctagagtgttcttttcttcacacgttagccattccttacggctcttcacgttccacgcctagatgtgaagtgggacatagtcttccattgctggctgtccctgaggaaacagacatgagtcttggaggttctgaatgattttattgctaattatcacagtgacatagactagaacagaaattagaagcatagtaagattgccaaaatcagagaatcttgcaaagttctgtaattctaagtgttgttctagatttcctctagagaaggttattagaatctccattgcgtttctctttctccttctctttcccttgaggttaggaaacaggttaaaactcagagaactccaataataatggtttaaaaacatcaggggcttcctgtatctcctgtcaggaagccgaggaataagcaggctggggctggtgggcgtcaacatcccagttttgttctatctttctgtcccacctgcactgggatgtggcttctacactcgaatttgcttcttggtttcaagacagtggtgttctttccatagctgagcagattattttgagaggtgggtgatatgtgagagagaaatctggaaccttcttctgggtagatacaggataagatagatacagggtaaaatgttgagcactttgtacatgctttgagagcataatctttgtcatctgtttttttcccctagacaatatcaggttaccgtcaacattaatccatttaaaaggacatggactgttgccattaatacttttggattccatataacccttaacacaataacttctagaaaatgtgtgtgccgtagacacaaagaagggaacaatagacaccagggtatacttgagggtggagggtggcaggagggtgaagattgaaaagctgcctattgcgtgttatgctggtttcctgggtgacaaaattacctgtacaccacacccctgtgacacacaacttactcatgtaacaaacctgtgcatgtaccccttgaacctgaaataaaaattggaaagtaaaaaaaagtgtgtaaatatatttagttgaatcaaataataaagatgaatcattatgaattca

SEQ ID NO: 383 - DNA, 395 bp, Homo sapiens
tccaccacgcctcccacctgccccactgcttcttctcctctcccttaggaactctagcttcacctcgcttcgtaatggaccccaattgctcctgctccactagctcttcctgcacctgcaccagctcctgcaaatgcagagagtgcaaatgcacctcctgcaagacgagctgctgctcctgctgccccgtgggctgtgccaagtgtgcccagggatgtgtttgcaaagggacatctgacaagtgcagctgctgctcctgatgtagggaaagctgtgttcccagaagtagaaagtgtacaaacctggaattgttttccatacaaccctgacccattagtacatttgggtttctaaaaataaaatatgttaatgataataaaagttgactttattct

SEQ ID NO: 384 - DNA, 2065 bp, Homo sapiens
accacacagacacacacctccttgctggagcattcactaggcgaggcgctccatcggactcactagccgcactcatgaatcggcaccatctgcaggatcactttctggaaatagacaagaagaactgctgtgtgttccgagatgacttcattgtcaaggtgttgccgccggtgttggggctggagtttatcttcgggcttctgggcaatggccttgccctgtggattttctgtttccacctcaagtcctggaaatccagccggattttcctgttcaacctggcagtggctgactttctactgatcatctgcctgcccttcctgatggacaactatgtgaggcgttgggactggaagtttggggacatcccttgccggctgatgctcttcatgttggctatgaaccgccagggcagcatcatcttcctcacggtggtggcggtagacaggtatttccgggtggtccatccccaccacgccctgaacaagatctccaatcggacagcagccatcatctcttgccttctgtggggcatcactattggcctgacagtccacctcctgaagaagaagatgccgatccagaatggcggtgcaaatttgtgcagcagcttcagcatctgccataccttccagtggcacgaagccatgttcctcctggagttcttcctgcccctgggcatcatcctgttctgctcagccagaattatctggagcctgcggcagagacaaatggaccggcatgccaagatcaagagagccatcaccttcatcatggtggtggccatcgtctttgtcatctgcttccttcccagcgtggttgtgcggatccgcatcttctggctcctgcacacttcgggcacgcagaattgtgaagtgtaccgctcggtggacctggcgttctttatcactctcagcttcacctacatgaacagcatgctggaccccgtggtgtactacttctccagcccatcctttcccaacttcttctccactttgatcaaccgctgcctccagaggaagatgacaggtgagccagataataaccgcagcacgagcgtcgagctcacaggggaccccaacaaaaccagaggcgctccagaggcgttaatggccaactccggtgagccatggagcccctcttatctgggcccaacctctccttaaataaccatgccaagaagggacattgtcaccaagaaccaggatctctggagaaacagttgggctgttgcatcgagtaatgtcactggactcggcctaaggtttcctggaacttccagattcagagaatgcgatttagggaaacggtggcagatgagtgggagactggttgcaaggtgtgaccgcaggaatcctggaggaatagagagtaaagcttctaggcatctgaaacttttgcttcatctctgacgctcgcaggactgaagatgggcaaattgtaggcatttctgctgagcagagttggagccagagatctacttgtgacttgttggccttcttcccacatctgcctcagactggagggggctcagctcctggggtgatatctagcctgcttgtgagctctagcagggataaggagagctgagattggagggaattgtgttgctcctggagggagcccaggcatcattaaacaagccagtaggtcacctggcttccgtggaccaattcatctttcagacaagctttagcagaaatggactcagggaagagactcacacgctttggttaatatctgtgtttccggtgggtgtaataggggattagccccagaagggactgagctaaacagtgttattatgggaaaggaaatggcattgctgctttcaaccagcgactaatgcaatccattcctctcttgtttatagtaatctaagggttgggcagttaaaacggcttcaggatagaaagctgtttcccacctctgtttgcttttaacattaaaagggaaatgtgcctctgccccacagttagaggggtgcacgttcctcctggttccttcgcttgtgtttctgtacttaccaaaaatctaccatttcaataaattttgataggagaca

SEQ ID NO: 385 - DNA, 2429 bp, Homo sapiens
gagagagacttccttggggagaggaattcagctgcacgctggagtcagctggagttgcccaggccctgtgagcaagtggcaggcgtgcccagctgcattggggagagggctgttctcaaggccaaggtcatttttggagggagaactggacgcctgatcaaatctggcccacaatggactcagcagccaaggatgagatgcagccggcgttgtcccctggacctgagtggccagagcaggagcgggcagagcagctggcccggggtgcagcgctcaagtgggcctcaggcatcttctaccggccggagcagctggccaggctaggccagtaccgcagccgcgaggtgcagcgtacctgctccctggaatcgcgcctcaagtcagtgatgcagtcatacctggaaggcgtgcagactggtgtgtggcagctggcccaggccattgaggtggtgcagggaacccgggaggccctgagccaggcccgtgggttgctccagggcatgtcccaggccttacagactctagagcccctacgggagcgggttgcccagcacaagcaactgcaggccctgtctcacctgctgcctcggctgcgggcagtgccggctgcagtgtcccacacacagactctgattgatggccaacagttcttggaggcatatgtgagccttcgggagctggagcagctgcgagaggatacgtgggcacccctggggggcctggagttgccagtcttccaggggctggaccttctgttcgaggcactgggccaggctgtggaagcagctgcaggggccgcagggaagctggcacgggaggacccagccctgttggtggctgctgtgcgtgtggcggaggtggagactggacgaacaacccccctgggccaggtcccccgggactggcgtcagcgctgtctgagggcactacaggagggcctggagcaggcccactttgggtcacctctgctgcctgcaccaggggccctaccagggtggctggaggctctgcgagtggccctgccagtcgagttggccacagctgaggcactagtagcgccttgctgcccgccacagtacaacgtggtccagctatgggcccacacgctgcatagtggtttgcgccgcagcctgcagaacctccttgcagggcctgagctagaagctgcggatgccttcgccttgctgcactgggcactgcatgtgtacctggggcaggaaatgatggggagcctggagttggggcctgaggctgatgtgtcccagctggagccccttctgaccttggagaacattgagcagctggaggcaacatttgtggccaacatccaggcaagtgtgtctcagtggctgcagaatgcactggatggggaggtagctgagtggggccgggagcatgggcccaacacagacccgtctggctcctattactcaccaatgccagccattgtgctgcagatcctggaagagaacattcgtgtggccagcctggtcagtgagtcactgcaacagcgagtgcatggcatggcactgtcagaactgggcacattcttgaggagcttcagtgatgctctgatccgattctcccgagaccacttcagggggaaatcaatggcccctcattacgtgccctacctactggccgccctcaaccacaagtcagcactcagctcctcagtgtctgtcctgcagctggacggggcgccttcaggggccttggctccagtggaagctgcgctggacgagttgcagaggaggatctaccgcttggtgttggaggcgctgcaggcggagctccagcccctgttcgcggatctgccctcgcgccaatggctgtcgagccctgagctcctgcaaagtgtgtgtgaacggacggggcgcttctgccgggacttctggcgcgtgcggaaccccacggttcagctgctgctggctgaggccgagcgtgccgtggtgctccagtacctgagcgcgctgatgcaaggccgcctggtgtgccgcggagccgacgagaggacccaggcggccgagcgcctgcggcacgatgctgcccagcttcagcagcttttcctcagtttgggcctggaggagaacgcgcactgcgcgccggtgctgctcgccctgagggagctgctaaacctccgcgaccccgcgctgctgggcctggaggtggctggcctgcggcaacaatttcccgacgtgagcgaggaccacgtctccgccctcttgggcctgcgcggggacttgtcccgggagcagcacctggccgcgctcagctccctgcaggctgcgctgccgccgtcgccccgcgcgagccgccgcgtcctcttcagcctagtgcccgcgcccgcgctcgcgccggcctcctgcctgccctcggggtcctgcgcccgagccctgctgctcgcagaataaaccacggctgccgga

SEQ ID NO: 386 - DNA, 7171 bp, Homo sapiens
agtgggctcgaaacaaagggctgtccggtggggattcgtcgcggcgccttctgagtggtcgggtcgaggcttctcggcctagcagtgccctcgctgcgcgatctcaggcgggttctcctcggctccgcgcagcccgcgccgcggtgggggacccggcgcagcggcacctgctgccgagggaccccgcggcccgccccggtgctcgtgatggggctgatcttcgccaaactgtggagcctcttctgtaaccaagaacacaaagtaattatagtgggactggataatgcagggaaaaccaccattctttaccaattcttaatgaatgaagtggttcatacttctccaaccataggaagcaatgttgaagaaatagttgtgaagaacactcattttcttatgtgggatattggtggtcaggagtctctgcgatcatcctggaacacatattactcaaatacagagttcatcattcttgttgttgatagcattgacagggaacgactagctattacaaaagaagaattatacagaatgttggctcatgaggatttacggaaggctgcagtccttatctttgcaaataaacaggatatgaaagggtgtatgacagcagctgaaatctcgaaatacctcacccttagttcaattaaggatcatccatggcacattcaatcctgctgtgctctcacaggagaagggttatgccaaggtctagagtggatgacctcccggattggtgtgagataacttttttgcttgaaagagactgctctatttattctgtgacatgaacattttttcctagtacctttggctgctaaggcagcagcatgtttaatttataacaacacaaacctctgagagcaacacttgaatcaagtgcagctgaactggaacataaaagattttttcttaactttttttttttaacacactaatcttcagttggatgaatgtaatgtataactatgttttcagcaacaattcttctgtttattctaattaatcagtgactgccttgtaagaaatgtttgtcatatgcgtgatgtcttctgaaatattcttataaccttaatgaccaattgctttcaattcttgaccagcactccctcccaaccagagaattactggtttgatagagtagtcttggaaaccatcaggtactgcctgcagacttctccagcactaaatatatttgttccctctataaaccattcatctttcggacagaacttactgtaaagaaagaaatctgcctagaggatatatgtaaggaagattccacatcatgagtacttgccttttaactttcccccacattactgttgagtcatggaataatgtttaagttgttatttgcatggaaattaagtaggctgtttatttatctaaaggaatcaagtccactcttctgcctgcaacatttgttcaaaaactaaccaaggtaaaatatttatttgaaagcccaactttgatgttaaatattcttgaataaatctgttattttaagaatatcacattattcaatgcatataaaactatcagaagttagtaaatcataccagcactaaaaataagacaattggaatatattttagcatcagtttacaaacaactttattatcaacagaaattttagctcttttctttgcaagatatatcacagctgctttgggcagtagctgaagccgaagtatgaacagtccattttgtttcttaaaatttgaagtcgtgtctgtcatagcatttttactaccagcagtatgttacttaaaaaactacatggctttccttgaatttatttgacggtattatgtaatagacttgaaacaattgccatctttgtagttatgccttgggttctaaaatgttataggaaactgctgaattgaatcctagcttttagaatattaataggagactcaaagttaatattcttaacaacttaaaattaaaaaaagtcataatctatcaaaagtttatttattggatggcattaaaacatttttgaggcagttgtctaatatgaacaataatctaaacaatatattccttaaattaagaggaaagacaagtgtcgtatttcgatcctgtttattcaaatgtgtgattttgctgaaatgaaagggataaaatgaatacttagagaataatacttcatttttgcagtactttttaattttgataaaaaagatacaaagttcataatatcaaaatatgtgttcaaaattggtattttaattttaatatttttgtaagttgatttaaattttgctcttttttcaggtgtgcttggtttattatatttagtcaagttaatttagtcgaatgtggtaacatttttctgatttatctttagttggagcacacccttgaactgaacagtggccaaaggaaagctttctgggctttggaaagtagttgtttaactttgttttaagccgttttcttagtgattctgtatcaagtagaggataagtgtagtttaacttagtttttaatataacccataatcaagaacatgagcgaaaagcagacataaatcgatatggatggtttgtggtgtgtgtgggatgtgggggaattaagaaaatgccatttacctaagcacagtttgcctgaatttctgcttggttgtgttgtttaccgtaagtactgagggtagtttccctaagtctgtcctgagaaaaagcatacttagtactcctgtatttgttcttatgaaatgactatctgccttcttgtatctagtaagattggctggctcaattttcttctgtcaaattatatggttattttttatattaccacatcagcattatattaaaagtgtttttaatagttgattgtattttgccaactactagtatagactcaaatttgctatttaatttttaaaatacaatttattttgtaaatcctttaaaaaatatttggttagttttggattagaaatgatttatgttagccatgtgttgaagatgaaattggcatcagtgtagacggtgctgattgggaaaagttcatgattaggaaattcatgtaagactttttaagagtattttttaggttttcactcaatctttcctgtcacagtaacgtgaaaactgattattctttactccaagagaatgttttaacccaagcaagtatctaatactagagcattggttctgacattcattgtaaatcagtgaactgtaagatactgtctaaaaaatgtacatttgtaattagtgcctttattcatattttgaaataagttcttagttttatattatacctgttctttagaagtcatgttagcagctaattatttcagtgatgaaataatttgtgttttatatcccccttcacctccatgtattggttagcacagtttatagtaagtgaaaagcaagggacccacctacattaccttcaggagactgttctaccttttaatttgaaaacaaggaaattaaattttaacagaaatcttttaagtatgttataaccaaagtgttcaattatccttgcaagttcaaatacagcatttttcttaattttgagcgtgtcatgtccttcatctttaaacccatcattcttattgaagcccatttgagaactcttagaattaatagaaccttttataagggaatatatggaatattttttattgttaatgtaacttaattccttaaaacctggaatattaatatatataatctattaaaagctgaagattaaatatgtaatttttgcttttagtttcttgtgttagtatgcttaaaggtatcaatacttttattctatattcattagaagaaaggtaataaatttaagtttcattgctgaaaaattttaaatgagtgccaccccatagccatagtcattttgattaagcataatttaactttcattatagcataaagagaaaataattattttagtatggaaacagtgataggcagtgctgtaaacaatattctctgaaaagttgtgggggtcacaaagaaaattttaaagaatatagaagcttttttaaaaaatctttttagtgtagtttcttagaacaaattataaacataatcattctgaataatcaatttttatttagtccttaactatgtaaaaccgtatcagtagaaaaatgtgctggtgtcgtgtctaaagatggataaatttctttggaatttatctttggagaccaactttatgaggcagactttttgtctacagctttggaaccaaaaaaacttcactctaattcagtcctaaaggctattttacattttgccggggtaaagtgacttcaagatacagcatggtgtcttgtatctagtagaatattgtgctagccatctaaaaaagtggatttgagccttaatttggccgtttctcaattgtctagttgaccttagacaattagtgtccatggctttccttttgtttttcccatactgaggaacttaaactacagctctaaaatgtcttttggttttaaaattctgaatgcttatatactactattaaaaattaaaaatccctcaaatagtagggcaatacaggtaatatgaaattaaatgtatttttatccattatttgattcccacctgttattttatttagaatacgaatacaaccaagtagggaaaaacgtatcagtaactgctattcaacttaaattcagcgaattaatagctgaatagaaatagctaatgacaatgcaaaagagaaaacaagccatattgctaagaaaaggatagtaagctgcttagaaagaaccagcctgtgttggaaataattctcttctagataatttaccttattttcttggcttgtactaattgaatggaagtggttaatttgttcagagtttattgccgtttgatgccaccccagtctatagttctgtgtgactttccatattgaaagagtagggttagtagccaggttgtcagtcttttacaaatgtctacataaatgtctacataaatctgaaagtggtttatattcaaggttagtttttcagtagcgtctcctccttattcattcacttttactgtgaagactgaaatccaaaagccaggttccccaaaaaagtatttttaaaaaattttaggggaccaaaataaatagaggaagaccaatataaaaaaatatgttcaactattccattttaaatttaaagcagaaaaaaaaattgtgcccctcagacctaaaggcagctttaaatgtatatagtttggtgaaacatttgggaaatattaatttggaggtttagaagcatacgaaaaacaaattcaaagcacttgaaagtaaagacaatatcatgaggtcgaaaaaacttcaaaaggatattaggtaagagaaaatgtgaatgaaagcagtgaatttctgcctctcctcgtatttagggtacttaaaattactaaaaaatactgtctttttaccatacagctagatggcctgtattattcttaatgtggccaaaggagtgaagactgattagggttttagaatttggaactgtagtcacataaaggcatcttttgcatttcttaaaccagtaatctacattttctcctggaaatggagaaatatgaaatgtgctgtgcatagcttttggaatagaaaacaaagttttaaaagaatggatatgttttcttgcacaacttgtaaaattttaattaaaaaattacctcatttttcaatccataaggtgctttgctcaagtttgtgggatgtttgtaccatcccataaaaacccccttcacccaaactgtatttgaaatatgcaaaattcataactaagggatagcattccttggagactttgttttgttttactcttgtttaccagctgggccaacatggtagatatatgagattcacatatggtttcattaaagcacataggaaagtgctcagtcaatatttaattagtttaattagataagggaaaggagaaatcctaaatttgatggattcttttatactgtgaatatatttccatcagtgttggtaagatatcaaatgactatcagttgatcccagtcatcagtgacttatttgcatatttaagccctattcacaagagaccataatcattttaatcttatattttccctcaggaaatttagggactctgaagcccctattttattctcttggagtaaactgttgagtgtagttacaaaaacttttatttatgacttaaaaaaagtttagctgctatttcagtgaaagtgtaaaataaaacggtcatgatttttttcaattacagaatagttacaaattttaccatgttcatctattccacagagcatgttaaaaacaacaacaacaaaaacctaacagcaattacaaccttggtgttgcgtttattctaatcagagtgaatgattataatcacactttgctattttaacataaattggtgctttagagcattaaagaggaagcagcaggccctgtactcagtatttattatttcttgcctcagaatgcaaaacaactttaaagtgtctatattcatatatatgtgcatttcttaagatttaaatacaaactgttgttactccttaagcttcaggctttctgcgaaagctctaagaatatcttcattactatgcttggtcaactggaagatggtattaataaggtcagaattaggaattggattgctctgtgggtcctccggtattgtgcagaggaaagaaaaatgtctttcacaccacaaactgtgtgtctgaaccccagccaaacaaatgtgttccattggtccaatatataagcattaacaacaacaacaaaaaatttaaaacaagtaaattaatgcattcacatgatcacttcttgaaaatggttcaaagcatgttttcctgatggtgggattgtttaaatgacatgttttaaagtttttaatactttattagttatgaagtgcttcttttatatgttaagtttaggttgccagtactcataatttttatttctgcaattatgttataatgagttgtttgcatgcctacttaacccaagtaaaacgatgctgtttgctctggaatgttcatcttttagacaggttttggctcatttccaatcatggtgcaatatagtgtaacattcatttgttttcattcaacagttttatttttgtcataataaataattacttttccaatav

SEQ ID NO: 387 - DNA, 2631 bp, Homo sapiens
gggttcgcggtgctcgctgaggcggcggtggctacggctggaggagccgggccgaggccgcggcggaggccgcggctggtactgggagggtggcagggagggacggggaaggaagatggcgacgtcgggggcgaacgggcctggttcggccacggcctcggcttccaatccgcgcaaatttagtgagaagattgcgctgcagaagcagcgtcaggccgaggagacggcggccttcgaggaggtgatgatggacatcggctccacccggttacaggcccaaaaactgcgactggcatacacaaggagctctcattatggtgggtctctgcccaatgttaaccagattggctctggcctggccgagttccagagccccctccactcacctttggattcatctcggagcactcggcaccatgggctggtggaacgggtgcagcgagatcctcgaagaatggtgtccccacttcgccgatacacccgccacattgacagctctccctatagtcctgcctacttatctcctcccccagagtctagctggcgaaggacgatggcctggggcaatttccctgcagagaaggggcagttgtttcgactaccatctgcacttaacaggacaagctctgactctgcccttcatacaagtgtgatgaaccccagtccccaggatacctacccaggccccacacctcccagcatcctgcccagccgacgtgggggtattctggatggtgaaatggaccccaaagtacctgctattgaggagaacttgctagatgacaagcatttgctgaagccatgggatgctaagaagctatcctcatcctcttcccgacctcggtcctgtgaagtccctggaattaacatctttccatctcctgaccagcctgccaatgtgcctgtcctcccacctgccatgaacacggggggctccctacctgacctcaccaacctgcactttcccccaccactgcccacccccctggaccctgaagagacagcctaccctagcctgagtgggggcaacagtacctccaatttgacccacaccatgactcacctgggcatcagcaggggcatgggcctgggcccaggctatgatgcaccaggacttcattcacctctcagccacccatccctgcagtcctccctaagcaatcccaacctccaggcttccctgagcagtcctcagccccagcttcagggctcccacagccacccctctctgcctgcctcctccttggcccgccatgtactgcccaccacctccctgggccacccctcactcagtgctccggctctctcctcctcctcttcctcctcctccacttcatctcctgttttgggcgccccctcttaccctgcttctacccctggggcctccccccaccaccgccgtgtgcccctcagccccctgagtttgctcgcgggcccagccgacgccagaaggtcccaacagcagctgcccaaacagttttcgccaacaatgtcacccaccttgtcttccatcactcagggcgtccccctggataccagtaaactgtccactgaccagcggttacccccatacccatacagctccccaagtctggttctgcctacccagccccacaccccaaagtctctacagcagccagggctgccctctcagtcttgttcagtgcagtcctcaggtgggcagcccccaggcaggcagtctcattatgggacaccgtacccacctgggcccagtgggcatgggcaacagtcttaccaccggccaatgagtgacttcaacctggggaatctggagcagttcagcatggagagcccatcagccagcctggtgctggatccccctggcttttctgaagggcctggatttttagggggtgaggggccaatgggtggcccccaggatccccacaccttcaaccaccagaacttgacccactgttcccgccatggctcagggcctaacatcatcctcacaggggactcctctccaggtttctctaaggagattgcagcagccctggccggagtgcctggctttgaggtgtcagcagctggattggagctagggcttgggctagaagatgagctgcgcatggagccactgggcctggaagggctaaacatgctgagtgacccctgtgccctgctgcctgatcctgctgtggaggagtcattccgcagtgaccggctccaatgagggcacctcatcaccatccctcttcttggccccatcccccaccaccattcctttcctcccttccccctggcaggtagagactctactctctgtccccagatcctctttctagcatgaatgaaggatgccaagaatgagaaaaagcaaggggtttgtccaggtggcccctgaattctgcgcaagggatgggcctgggggaactcaagggagggcctaaagcacttgtaactttgaaccgtctgtctggaggtcagagcctgttggaaagcaggggtagaggggagccctggaagcagggcttttccggatgcctaggggtgggcagtgccagcccctcctcaccactcttccccttgcagtggaggagagagccagagtggatactattttttattaaatatattattatatgttaataaaaaaatcatatcaaa

SEQ ID NO: 388 - DNA, 3837 bp, Homo sapiens
gagctgtccagagcctttgcaaatgcatgcagagcatggaaatgacccagctgccctgctgttgaaacagaatcctatttggaaggcagacatgtggcccatctctgtagccatcactgagaaatctggattttcaagcaatgattttcaacaattataaaatggaagttgtagactggataagagatgctcagctaagggagttcctggatggtctttagattgatacaccaatcctctgaaattgcatgcaaaaatgttttcctgggatcagctgcactccttagcaaaagtatattggagaatcaactgagaaagtaactgagacatttcaatcatttctaggtgtaaagaaagaccagatcccaggaaaatattacggtgacttcccaagtatgcctggccacaatacctccaggaattcctcttgcgatcctatagtgacaccccacttaatcagcctctacttcatagtgcttattggcgggctggtgggtgtcatttccattcttttcctcctggtgaaaatgaacacccggtcagtgaccaccatggcggtcattaacttggtggtggtccacagcgtttttctgctgacagtgccatttcgcttgacctacctcatcaagaagacttggatgtttgggctgcccttctgcaaatttgtgagtgccatgctgcacatccacatgtacctcacgttcctattctatgtggtgatcctggtcaccagatacctcatcttcttcaagtgcaaagacaaagtggaattctacagaaaactgcatgctgtggctgccagtgctggcatgtggacgctggtgattgtcattgtggtacccctggttgtctcccggtatggaatccatgaggaatacaatgaggagcactgttttaaatttcacaaagagcttgcttacacatatgtgaaaatcatcaactatatgatagtcatttttgtcatagccgttgctgtgattctgttggtcttccaggtcttcatcattatgttgatggtgcagaagctacgccactctttactatcccaccaggagttctgggctcagctgaaaaacctattttttataggggtcatccttgtttgtttccttccctaccagttctttaggatctattacttgaatgttgtgacgcattccaatgcctgtaacagcaaggttgcattttataacgaaatcttcttgagtgtaacagcaattagctgctatgatttgcttctctttgtctttgggggaagccattggtttaagcaaaagataattggcttatggaattgtgttttgtgccgttagccacaaactacagtattcatatttgcttcctttatattgggaataaaaatgggtataggggaggtaagaatggtatttcattacttgatcaaaaccatgccttgatgtacccaaaacaaaaggactataaaatgcaagagccctcattgtagtccttatgggatccctcccatctctgagtgatggccgtacaaagaccagtgttgttgaatccacctggagttgcaatattacattattttccagtacagaatgtctgtgtggcccatgaaagcaacataggttttaagagttttagagtttcattagctcattctaagttcctctgtttgaagcatggtctcttaggttttggactgaactcagacctttagttcttttcatcccacttcaccttaggtaagtaaattctggccaccacccagctccaaagacacaaactctccttcgctaaccaggttagatgtcccattcatctcatgccctgataaaaactgataaggggagagaatagttaaaaatttttctagggtatcataactctggtaggaagtcatctgtctagaaatcaagagaaaaagaacgtgtggcctcctgttataacaagggtttctagatttgtcctgtgaaaggtcgtttaaggacttggggatcaacttcctcaattatcaccaattgcactgttgctccaaaaatcatttaaaagcttactggacatatctacataatggtgaaactgtaatttagagactatccctgactaatgtgctggtaggcattaaaatgagttcccaagggaagtgattaaaatttttttctcttctgttttttgagagaatttctagatgtcctgggccacagttaattaagatttttaggggggacagaaagttatactgaaatctttagagctcccttccgccgttaaaattatatatatatatatttaaattataccttaagttctggggtacatgtgcagaatgtgcaggtttgttacataggtatacacgtgccatggtggtttgcggcacctgtcaacccatctacattaggtatttctcctaatgctctccctcccctagccccccacccctggacaggccccattgtgtgatgttcccctccctgtgtccatgtgttttcattgttcaactcccacttctaagtgagaacatgcggtgtttggttttctgttcctgtgttagtttgctgagaatgatggtttccaggttaaaattatatatttttaaataaatgaaaactgtgtttttaaaagaggacttttgagaagtatatagaaaaaccattaatttagactctgtgagattaggttgcatgaagaaggttttctgaatatttgaagagtggataaataaatgtcccccaaagcaataaaatcataatcctttaaaatataggaaaaataactaatgggaactaggcttaatactcgggatgaaataatctgtacaacaaactcccatgacacatgtttacctatgtaacaaacctgcacatgtacccctgaacttaaaataaaatttaaagtaataataataaaataatatggattttctttccaaattcggaattactttttgtaaaattgtattaataacttgtggcatgtggcacgttaaactgattttatttcaagaacttctgttactggctaggttgatacataggcttgtgggtttttgctttttgggttttttttgctcctgcccatacttccagtgtcttcagtgttttatcttaaaattttcccaggatctgatccagtttcatatttaatgctgcagaaaacctgaagtgattagtaacatgaatagaataacagaatgaattaagggaactttttttttcatcaaggtatatcttcgggatttaaaagtttttcataatttattatcactgtggatccacaaattcctcagatgaataagaaatacctctgtgaatttctgtgaccactaaaattactgagccacagaaattaattctgaggaagcagaagtagcaacatagttcaaacatgacttgtttccatatattttctgttttatatattcttttaaatatccttttaaacaagtaatatttcttttctttcttgccttttttcccatttattttttacattttttctttctcattttgaaccataaaatttgtaagaccgttactaagacccctgatagttttaagaaaatttataatacctataaatatgtaaaaaaaatttagaaaaatatttaaattaaaagtattcatgagaatttcattaccttgtagattatgtcatactcttttccagattttagatatgttgaggtcaggcaattcaaaagaattaatctctgtattaatctgttataatgttaacataacactatgttattttcatatattataataacaggcttattagaaatgttctcaaaagatagaaatgcaatatttcataatataaaatatctttttcatcagtatttatggaataaatagaaaaatttta

SEQ ID NO: 389 - DNA, 690 bp, Homo sapiens
gcagttgcagtcgtgttctccgagttcctgtctctctgccaacgccgcccggatggcttcccaaaaccgcgacccagccgccactagcgtcgccgccgcccgtaaaggagctgagccgagcgggggcgccgcccggggtccggtgggcaaaaggctacagcaggagctgatgaccctcatggtatatgaagacctgaggtataagctctcgctagagttccccagtggctacccttacaatgcgcccacagtgaagttcctcacgccctgctatcaccccaacgtggacacccagggtaacatatgcctggacatcctgaaggaaaagtggtctgccctgtatgatgtcaggaccattctgctctccatccagagccttctaggagaacccaacattgatagtcccttgaacacacatgctgccgagctctggaaaaaccccacagcttttaagaagtacctgcaagaaacctactcaaagcaggtcaccagccaggagccctgacccaggctgcccagcctgtccttgtgtcgtctttttaatttttccttagatggtctgtcctttttgtgatttctgtataggactctttatcttgagctgtggtatttttgttttgtttttgtcttttaaattaagcctcggttgagcccttgtatattaaataaatgcatttttgtcctttttta

SEQ ID NO: 390 - DNA, 1072 bp, Homo sapiens
gcatttctcctctgtgctcattgccacatgcagctcagcctgggctacacagccaggtgtcagatgtgtctctgctgatctgagtctgcctgtggcatggacctgcatcttccctgaagcatctccagggctgaaaaatcactgaccatggcaccatggtctcatccatctgcacagctgcagccagtgggaggagacgccgtgagccctgccctcatggttctgctctgcctcgggaacctctccaaagccaccctctgggctgagccaggctctgtgatcagccgggggaactctgtgaccatccggtgtcaggggaccctggaggcccaggaataccgtctggttaaagagggaagcccagaaccctgggacacacagaacccactggagcccaagaacaaggccagattctccatcccatccatgacagagcaccatgcagggagataccgctgttactactacagccctgcaggctggtcagagcccagcgaccccctggagctggtggtgacaggattctacaacaaacccaccctctcagccctgcccagtcctgtggtgacctcaggagagaacgtgaccctccagtgtggctcacggctgagattcgacaggttcattctgactgaggaaggagaccacaagctctcctggaccttggactcacagctgacccccagtgggcagttccaggccctgttccctgtgggccctgtgacccccagccacaggtggatgctcagatgctatggctctcgcaggcatatcctgcaggtatggtcagaacccagtgacctcctggagattccggtctcaggtgaggaagccacagtcttctctagtacaattcagggaagccagacaggttgtggagagctttacaggcagggcagcccctgctaagaaagacaaaaaggggaaggagaacacagaaatcctagggacacaaattcagggtgaggaaaacaaagcaagggctgggcacagtggctcacacgtgtaatctcagcactttgggaggccgaggcaggtggatcacctgatgtcaggagttcaagaccagcct

SEQ ID NO: 391 - DNA, 1446 bp, Homo sapiens
acaacattcgccgggcgggcggcggcggagcgggcggcggagcggcggcagcagcggtgagcgcgagccccggagccccgggcggccggcctcccgcgcccgcgcagccccgcgtctgcgtccggccggagacgccgggccccgcgccgcgccgcgccatgtcggtgaacatggacgagctgcggcaccaggtcatgatcaaccagttcgtgctggccgcgggctgcgcggccgaccaggcgaagcagttgctgcaggcggcccactggcagttcgagaccgcgctgagcacgttcttccaagaaaccaacattcccaacagccaccaccaccaccagatgatgtgcactcccagcaacacccctgccacgccgcccaacttccccgatgcgctggccatgttctccaagctccgcgcctccgagggcctgcagagcagcaacagccccatgacagccgcagcctgctccccacctgcaaacttcagccccttctgggcctcgtccccgcccagccaccaggcgccctggatcccgccctcctcccccaccaccttccaccacctccaccgcccacagcccacgtggcccccaggagcacagcaggggggcgcccagcagaaagccatggcggccatggacggccagagatgagactggacgccgccgggcgctgggctggagctgggggcagcccagggttgtggggacacaggagggccagggaggggggagccggggagggcagggggtttcccgaagatcgcactggaagattttataaaagaatttttgtgggtcggggggacagtaaacttcctgggccacgtgggtccttcaggagtttttcaggcaagtttttcctctgtttttaatatataactataatatatatgaatagataaatataactaatgtgcgtgagaatgggcctggcacacctggggtgctcgggggtagggctgccatgctgcagagctgatggagtgatgttgtgggcacaaggcatctgtcagctgcctcctttaacagccatgccttctggaatctggaagaggacaccactcctgcagtcactgggcagccacatagcagctgcaggtcccaggagggcctgaggtcaaagctgtggaaggccctcttggtatcagggctctctccccatggcctcttccccacctctgattgctggttgtggccccatagctcatcacccctgtctcctgctgaatgtgcagggctgatgtggcactgaggagctgactttggtcaaaggccaggctctgcccagcaggggacttgactgccctgggcgccctgcccctcccgctgcgtgtccaggtccaaagtggagagcctgcctttgggtttagttcccgaatcagaatcccatctcaccagggcgaaattttaatttaaaaacttaaaaagagacttttctaacttc

SEQ ID NO: 392 - DNA, 1276 bp, Homo sapiens
attaaacggttgcaggcgtagcagagtggtcgttgtctttctaggtctcagccggtcgtcgcgacgttcgcccgctcgctctgaggctcctgaagccgaaaccagctagactttcctccttcccgcctgcctgtagcggcgttgttgccactccgccaccatgttcgaggcgcgcctggtccagggctccatcctcaagaaggtgttggaggcactcaaggacctcatcaacgaggcctgctgggatattagctccagcggtgtaaacctgcagagcatggactcgtcccacgtctctttggtgcagctcaccctgcggtctgagggcttcgacacctaccgctgcgaccgcaacctggccatgggcgtgaacctcaccagtatgtccaaaatactaaaatgcgccggcaatgaagatatcattacactaagggccgaagataacgcggataccttggcgctagtatttgaagcaccaaaccaggagaaagtttcagactatgaaatgaagttgatggatttagatgttgaacaacttggaattccagaacaggagtacagctgtgtagtaaagatgccttctggtgaatttgcacgtatatgccgagatctcagccatattggagatgctgttgtaatttcctgtgcaaaagacggagtgaaattttctgcaagtggagaacttggaaatggaaacattaaattgtcacagacaagtaatgtcgataaagaggaggaagctgttaccatagagatgaatgaaccagttcaactaacttttgcactgaggtacctgaacttctttacaaaagccactccactctcttcaacggtgacactcagtatgtctgcagatgtaccccttgttgtagagtataaaattgcggatatgggacacttaaaatactacttggctcccaagatcgaggatgaagaaggatcttaggcattcttaaaattcaagaaaataaaactaagctctttgagaactgcttctaagatgccagcatatactgaagtcttttctgtcaccaaatttgtacctctaagtacatatgtagatattgttttctgtaaataacctatttttttctctattctctgcaatttgtttaaagaataaagtccaaagtcagatctggtctagttaacctagaagtatttttgtctcttagaaatacttgtgatttttataatacaaaagggtcttgactctaaatgcagttttaagaattgtttttgaatttaaataaagttacttgaatttcaaacatca

SEQ ID NO: 393 - DNA, 2860 bp, Homo sapiens
aaacggggaacttagaaagtggcagcccctcggcttgtcgccggagctgagaaccaagagctcgaaggggccatatgacactcctcccggacccctggacacacacagccctggagactggagccttggagcatggcaagtccagagcaccctgggagccctggctgcatgggacccataacccagtgcacggcaaggacccagcaggaagcaccagccactggccccgacctcccgcacccaggacctgacgggcacttagacacacacagtggcctgagctccaactccagcatgaccacgcgggagcttcagcagtactggcagaaccagaaatgccgctggaagcacgtcaaactgctctttgagatcgcttcagctcgcatcgaggagagaaaagtctctaagtttgtggtgtaccaaatcatcgtcatccagactgggagctttgacaacaacaaggccgtcctggaacggcgctattccgacttcgcgaagctccagaaagcgctgctgaagacgttcagggaggagatcgaagacgtggagtttcccaggaagcacctgactgggaacttcgctgaggagatgatctgtgagcgtcggcgcgccctgcaggagtacctgggcctgctctacgccatccgctgcgtgcgccgctcccgggagttcctggacttcctcacgcggccggagctgcgcgaggctttcggctgcctgcgggccggccagtacccgcgcgccctggagctgctgctgcgcgtgctgccgctgcaggagaagctcaccgcccactgccctgcggccgccgtcccggccctgtgcgccgtgctgctgtgccaccgcgacctcgaccgccccgccgaggccttcgcggccggagagagggccctgcagcgcctgcaggcccgggagggccatcgctactatgcgcctctgctggacgccatggtccgcctggcctacgcgctgggcaaggacttcgtgactctgcaggagaggctggaggagagccagctccggaggcccacgccccgaggcatcaccctgaaggagctcactgtgcgagaatacctgcactgagccggcctgggaccccgcagggacgctggagatttggggtcaccatggctcacagtgggctgtttggggttctttttttttatttttccttttcttttttgttatttgagacagtcttgctctgtcacccagactgaagtgcagtggctcaattatgtctcactgcagcctcaaactcctgggcacaagcaatcctcccacctcagcctcccaagtagctgggattacaggtgcacaccaccacaccaggctaatttttaattttttagtagagacagggtctctctgttgcccaggctggtctctaacttctgaccttaaatgatcttcctgcctcagcttcccaaaacactggggttacaagtgtgagccaccacccctggcctggggttcatttttaatgggaaaagccactgggggctctaactcgctgggtgactttggacaagcccctcctctggtcctcaatttctccatctgtattggacagaggtgctcctgggaccccttggaagcctctgcttgtgtcccacgtcctcttgatgccagggccacttcatctccaaaacacaaaaccaactgccaaaaccgtccagagcagtgtccaccccaccagtgtctttgtgggaagctggagaagaagtttacctcacacattctagacaaaacttagtccatttccttgaagacagttctctccagctgctccaaggcttttctctctgttccttccaccttggaattgctttaaaatatttccatccattatcctaatactatcttagtattctagcccttcccccttaccatgtagacctgacaaagcaaaacaaaagctcacctattgccctcaagaacagcctctacacacacacacacacacacacacacacacacacacacacacacggtgggagttgtatgccatccttttgaagggtgggaggaccctggaccagaaagcaataatggcataagattctgtgataccaggcatttttggcaagggaagttgccaacaatttttctggctgggatggcatagcacattgtctaggggtggattttcattcataaggcagctgttccctgaatggcttccctgggttatgtagaaacagcctggggaggaggtgatacaacatacttaatggggcctctgggcagaaaacagactgaatcctcaacactgccccttttgagggtctgtgatcctggaacttctctgatggactgggatgcccttaactgaggtctgctgtctggaaaggacaccacaggcccagaatgaaggggcatctggaccaatgacctagattcaacacagggcttggagctggtggtacaggctggttttggcccaatgtgtgttggaggctggaagcccctgaagacctaaactgcctggatgagcttattagggtgaattaatgagtctgtaatttgggaaccttaatgtgagacaccacttaaggagaggaacttggcccagcaagtgatcactctagaagtggacagctatgcactagactgcaccagaatctgttcaacagcgacaccttgtggtaaaaactgtagacgccccatcaggctggatgggaaactagaaacagactgtctcatctttggacagatatccctcaaatctcccaatctactccagggaaaagacacttcaagtgagagatattggacttcttgaaaatctaggcctatggaaaattaaagtgttaaatggaaaaattaaagagctatgagtctatttgtaatgatgaaa

SEQ ID NO: 394 - DNA, 7214 bp, Homo sapiens
gtgagtcgctgcaggagcagcttagctcggcttggttgccttggtctctgtgggcagcatcggaggggggtcgggaggaggaggaggaggcagcggcagagaagagagaggcgtgtgagccgtgctccaccggctagctccttcccgctgctcctgcctggcagtgccaggcagcccacaccagcatggccttgctcatccacctcaagacagtctcggagctgcggggcaggggcgaccggatcgccaaagtgactttccgagggcaatccttctactctcgggtcctggagaactgtgaggatgtggctgactttgatgagacatttcggtggccggtggccagcagcatcgacagaaatgagatgctggagattcaggttttcaactacagcaaagtcttcagcaacaagctcatcgggaccttccgcatggtgctgcagaaggtggtagaggagagccatgtggaggtgactgacacgctgattgatgacaacaatgctatcatcaagaccagcctgtgcgtggaggtccggtatcaggccactgacggcacagtgggctcctgggacgatggggacttcctgggagatgagtctcttcaagaggaagagaaggacagccaagagacggatggactgctcccaggctcccggcccagctcccggcccccaggagagaagagcttccggagagccgggaggagcgtgttctccgccatgaagctcggcaaaaaccggtctcacaaggaggagccccaaagaccagatgaaccggcggtgctggagatggaagaccttgaccatctggccattcggctaggagatggactggatcccgactcggtgtctctagcctcagtcacagctctcaccactaatgtctccaacaagcgatctaagccagacattaagatggagccaagtgctgggcggcccatggattaccaggtcagcatcacggtgatcgaggcccggcagctggtgggcttgaacatggaccctgtggtgtgcgtggaggtgggtgacgacaagaagtacacatccatgaaggagtccactaactgcccctattacaacgagtacttcgtcttcgacttccatgtctctccggatgtcatgtttgacaagatcatcaagatttcggtgattcactccaagaacctgctgcgcagtggcaccctggtgggctccttcaaaatggacgtgggaaccgtgtactcgcagccagagcaccagttccatcacaagtgggccatcctgtctgaccccgatgacatctcctcggggctgaagggctacgtgaagtgtgacgttgccgtggtgggcaaaggggacaacatcaagacgccccacaaggccaatgagaccgacgaagatgacattgaggggaacttgctgctccccgagggggtgccccccgaacgccagtgggcccggttctatgtgaaaatttaccgagcagaggggctgccccgtatgaacacaagcctcatggccaatgtaaagaaggctttcatcggtgaaaacaaggacctcgtggacccctacgtgcaagtcttctttgctggccagaagggcaagacttcagtgcagaagagcagctatgagcccctgtggaatgagcaggtcgtctttacagacctcttccccccactctgcaaacgcatgaaggtgcagatccgagactcggacaaggtcaacgacgtggccatcggcacccacttcattgacctgcgcaagatttctaatgacggagacaaaggcttcctgcccacactgggcccagcctgggtgaacatgtacggctccacacgtaactacacgctgctggatgagcatcaggacctgaacgagggcctgggggagggtgtgtccttccgggcccggctcctgctgggcctggctgtggagatcgtagacacctccaaccctgagctcaccagctccacagaggtgcaggtggagcaggccacgcccatctcggagagctgtgcaggtaaaatggaagaattctttctctttggagccttcctggaggcctcaatgatcgaccggagaaacggagacaagcccatcacctttgaggtcaccataggcaactatgggaacgaagttgatggcctgtcccggccccagcggcctcggccccggaaggagccgggggatgaggaagaagtagacctgattcagaacgcaagtgatgacgaggccggtgatgccggggacctggcctcagtctcctccactccaccaatgcggccccaggtcaccgacaggaactacttccatctgccctacctggagcgaaagccctgcatctacatcaagagctggtggccggaccagcgccgccgcctctacaatgccaacatcatggaccacattgccgacaagctggaagaaggcctgaacgacatacaggagatgatcaaaacggagaagtcctaccctgagcgtcgcctgcggggcgtcctggaggagctgagctgtggctgctgccgcttcctctccctcgctgacaaggaccagggccactcatcccgcaccaggcttgaccgggagcgcctcaagtcctgcatgagggagctggaaaacatggggcagcaggccaggatgctgcgggcccaggtgaagcggcacacggtgcgggacaagctgaggctgtgccagaacttcctgcagaagctgcgcttcctggcggacgagccccagcacagcattcccgacatcttcatctggatgatgagcaacaacaagcgtgtcgcctatgcccgtgtgccctccaaggacctgctcttctccatcgtggaggaggagactggcaaggactgcgccaaggtcaagacgctcttccttaagctgccagggaagcggggcttcggctcggcaggctggacagtgcaggccaaggtggagctgtacctgtggctgggcctcagcaaacagcgcaaggagttcctgtgcggcctgccctgtggcttccaggaggtcaaggcagcccagggcctgggcctgcatgccttcccacccgtcagcctggtctacaccaagaagcaggcgttccagctccgagcgcacatgtaccaggcccgcagcctctttgccgccgacagcagcggactctcagacccctttgcccgcgtcttcttcatcaatcagagtcagtgcacagaggtgctgaatgagaccctgtgtcccacctgggaccagatgctggtgttcgacaacctggagctctatggtgaagctcatgagctgagggacgatccgcccatcattgtcattgaaatctatgaccaggattccatgggcaaagctgacttcatgggccggaccttcgccaaacccctggtgaagatggcagacgaggcgtactgcccaccccgcttcccacctcagctcgagtactaccagatctaccgtggcaacgccacagctggagacctgctggcggccttcgagctgctgcagattggaccagcagggaaggctgacctgccccccatcaatggcccggtggacgtggaccgaggtcccatcatgcccgtgcccatgggcatccggcccgtgctcagcaagtaccgagtggaggtgctgttctggggcctacgggacctaaagcgggtgaacctggcccaggtggaccggccacgggtggacatcgagtgtgcagggaagggggtgcagtcgtccctgatccacaattataagaagaaccccaacttcaacaccctcgtcaagtggtttgaagtggacctcccagagaacgagctgctgcacccgcccttgaacatccgtgtggtggactgccgggccttcggtcgctacacactggtgggctcccatgccgtcagctccctgcgacgcttcatctaccggcccccagaccgctcggcccccagctggaacaccacggtcaggcttctccggcgctgccgtgtgctgtgcaatgggggctcctcctctcactccacaggggaggttgtggtgactatggagccagaggtacccatcaagaaactggagaccatggtgaagctggacgcgacttctgaagctgttgtcaaggtggatgtggctgaggaggagaaggagaagaagaagaagaagaagggcactgcggaggagccagaggaggaggagccagacgagagcatgctggactggtggtccaagtactttgcctccattgacaccatgaaggagcaacttcgacaacaagagccctctggaattgacttggaggagaaggaggaagtggacaataccgagggcctgaaggggtcaatgaagggcaaggagaaggcaagggctgccaaagaggagaagaagaagaaaactcagagctctggctctggccaggggtccgaggcccccgagaagaagaaacccaagattgatgagcttaaggtataccccaaagagctggagtccgagtttgataactttgaggactggctgcacactttcaacttgcttcggggcaagaccggggatgatgaggatggctccaccgaggaggagcgcattgtgggacgcttcaagggctccctctgcgtgtacaaagtgccactcccagaggacgtgtcccgggaagccggctacgactccacctacggcatgttccagggcatcccgagcaatgaccccatcaatgtgctggtccgagtctatgtggtccgggccacggacctgcaccctgctgacatcaacggcaaagctgacccctacatcgccatccggctaggcaagactgacatccgcgacaaggagaactacatctccaagcagctcaaccctgtctttgggaagtcctttgacatcgaggcctccttccccatggaatccatgctgacggtggctgtgtatgactgggacctggtgggcactgatgacctcattggggaaaccaagatcgacctggagaaccgcttctacagcaagcaccgcgccacctgcggcatcgcccagacctactccacacatggctacaatatctggcgggaccccatgaagcccagccagatcctgacccgcctctgcaaagacggcaaagtggacggcccccactttgggccccctgggagagtgaaggtggccaaccgcgtcttcactgggccctctgagattgaggacgagaacggtcagaggaagcccacagacgagcatgtggcgctgttggccctgaggcactgggaggacatcccccgcgcaggctgccgcctggtgccagagcatgtggagacgaggccgctgctcaaccccgacaagccgggcatcgagcagggccgcctggagctgtgggtggacatgttccccatggacatgccagcccctgggacgcctctggacatctcacctcggaagcccaagaagtacgagctgcgggtcatcatctggaacacagatgaggtggtcttggaggacgacgacttcttcacaggggagaagtccagtgacatcttcgtgagggggtggctgaagggccagcaggaggacaagcaggacacagacgtccactaccactccctcactggcgagggcaacttcaactggcgctacctgttccccttcgactacctggcggcggaggagaagatcgtcatctccaagaaggagtccatgttctcctgggacgagaccgagtacaagatccccgcgcggctcaccctgcagatctgggatgcggaccacttctccgctgacgacttcctgggggccatcgagctggacctgaaccggttcccgcggggcgcaaagacagccaagcagtgcaccatggagatggccaccggggaggtggacgtgcccctcgtgtccatcttcaagcaaaagcgcgtcaaaggctggtggcccctcctggcccgcaatgagaacgatgagtttgagctcacgggcaaggtggaggctgagctgcatttactgacagcagaggaggcagagaagaacccagtgggcctggcccgcaatgaacctgaccccctagagaaacccaaccggcccgacacgagcttcatctggttcctgaaccctctcaagtcggctcgctacttcttgtggcacacgtatcgctggctgctcctcaaactgttgctgctcctgctgctgctcctcctcctcgccctgttcctctactctgtgcctggctacctggtcaagaaaatcctcggggcctgagcccagtggcctcctggccggcccgacacggccttcgtctggttcctcaaccctctcaagtccatcaagtacctcatctgcacccggtacaagtggctcatcatcaagatcgtgctggcgctgttggggctgctcatgttggggctcttcctctacagcctccctggctacatggtcaaaaagctccttggggcatgaaggccgccagctcccgccagccgctccccagccctgccgcatttcctttcagtggcttggactctttcccatctcccctggggagcctgaggagcccagcgtccactcttcatgccttgggccgagcctgcctcctgcttgcgggggccgcctgtcctcactgccccaggctgcggcttgcccagtcccgcccctctgacccctgcctgtgggctggggagccttggatggggtggggacctggaatgggtctctcttgccccacctggctgaggcgccacccttcttcaggcccaggctccagaggaagactcctgaaaccctccccaggtcttccaagtacaggattgaagctttagtgaaattaaccaaggaccatgggtcagtgcccagggctttaaaaagaatgaacgagcaaaaggtatccccgccgtgacccctgcagatagcaccggtctttgatccgcagcaggggccagaccctgcccacaagtcccagcgcggctgcttctgccactgctgggctccacttggctcctctcacttcccagggggtcgcctgtcctgcctgtgggtttccatggcttcccagagctccctctgccccagccagcgcctccaggcccagctgaggagctgtgagaagcagcagaggggactccccatcccgggcacaccctgtcctcccacccctgcccccttgcccttccagccctttcagctgcagctgggagctggcccgtcaagtgctgcccctgcctgtgtctgggtttctgttggctgtttttcttttcttgagtggtgatttttctctaaataaaagaagtcaagcactga

SEQ ID NO: 395 - DNA, 1721 bp, Homo sapiens
ggaagagcagtgtcgggccatggccagggcccgcaggctggagctggccgaggccctggcgctggggccaggctagaggcatgcctgctatgcgctcctgcacgcgccggaccctggaattctctctggccgcctccctctgcgctacgccatactggtgaggagggcgcgcgcccggccactctccgctctggccttgcaccttccttgcggcgctactctcgggtgtccctgccaatcccagcttcctcctctctcagatgcagatgcgctttgatgggcgcctgggcttccctggcggattcgtggactcgcaagacagcagcctggaggacgggctgaaccgtggtctgctggaactgctgggcgaggcggcggccgccttccgcgtggagcgccctgactaccgcagctctcacgccggatcaaggccacgtgttgtggcccacttctatgccaaatctctgacgctcgagcagctgttggctgtggaggccagcgcaacaggggccaaggaccacgggctggaggtgctgggcctggtgtgagtgcccctgtaccctgcatgatggtgtgggaggcctgcccatctttctggagaattgctttattggtgctgcctgggagcagttactggataccctccaggacttgggagtggtggaagctggtgctttctcaggacttcagatcccagttcgtctgaggcaaccctctgtggactcagggaacctgagctgaggactttggtacaaggaagggaatgttttctcttccggacctaaagacgataccaaattaaaagaagacatgtatatcatatgttttgagcagaggaccctccaattcatgggatcaggggcaaaaatccacagctcatcccaggggccctggcaggttctcagagcctacctcttccttgtatatttgcatacagcctggtaacccccaggcatgcatatgtacaatgtgaccacacacagcctgacatctttcacctgtcaagtccaatttaaccaggaattggcatttgttaccataccctgcctcttgctttgcagagagcttctacagcaaggctgagtccttcccacagtcctccatgcctgctctttagggtctaccccagcccatgttttttgggaaggatagagaagcagaggaccctctttgctttcctgaaagtagccatgcccttgctggagggttcaccacagcaattggtgggaaagggtcttaaccaatctccaacacttttcttctcctgaaactgagaaggggtaaggaagtagctaggtccccttggacggagcatggacatgagacctgtgagtactggtgtctctccttcagagctttcatctttggttcgctgtagactctgggactatcagaagagaactgacccatacctgtctagccctgcccttccaaaaaaagagcctcccattaaagaggagttagagctgggccttgaggctcttcacttctttcaacagatatttaatatgtacctactaaatgccaggtactataaaaggtatagagagccatccttgctctccaagactccagggaagggatgggcaaacattttcttaaaagccagatagcaaatactttaagctttgtaaactacatagttttttaaaaaatattttctaacattgactaataaaaattgcctatgtttactgtgtacaaaaaaaaaaaaaaaaaaa

SEQ ID NO: 396 - DNA, 4586 bp, Homo sapiens
aaaggaaggagggtgactgcagagaccggccctgggcagcggtaccaggggcacagggagcctggcccggcccattgtcactggaattcatgccatgcagacttctacatcaaagggaaacaaggtcgggagggccgaggggtccacggcactccgcacccacggggccaggctggcacaacgccccaacgctgcaatcctgggaagagtcacacgcgccctcccgggacccacgtgaccatcaagggagtgtggaggacacatccctcgggggtgacgcccctgcagatggagtttccccatctgtgccacccttgcaaggcctgggaaaggctgcggggccaggcggcaccgggcaagctgagtgccaggtggtggttgcaacacaccgggcaaatctgaaaccatgggacggacgagctgcacccctgggaaagagaacagaggaaggccggttatcaacgtcctcctgtgcctcagtttccagaaacaagccagactcagtgcctcagggagaccccgtgtggcctccggagagcacgggacccgccctttgtgcaggtgaggaaactgaaccccagagcagtgagggactggcctggggaccctgggctcagccctgggcgccttccctctgcccatctcagacgggcacagccagcaccgcctcaccccaacgcgcctccagactggccctccaggggcccccaggcacaatcctctcactttcttcctcaagcccctgccttcccccttcgcactgtgacccaggggctgctagcagctgggctgggctccaaagcttgaagctgcttctccaggtctctttccagggggcggcggatggctgctcactcagggacgccaacaccaacaggaagggacccatgcacggatctgacttccctcccaggctctgccttcactcaatgtccctgtggggcagctggggctcccggccgccctcccctgcccacagccgtgaggttgcttcctagggttctgttttccccacagtcggaactgaggtgctgggaggctccagaagagggatggggtggagcaagtggcctggagccccccagggcagaccccaaagagaagggtcagaagtgccctctggggcctgggcagctggggggagcccacaagcctgagaccctgtgggagggaagcgcccccaccccgtggtaagaaaggggctggtagaggctcctatgtggctccctctgtcccctcccgacctctggccaggcttgggataatccctgagtggacacaggcgccacgatggggtctcgggggtgagggctgaggaggctgagcctccaaggaccccagggtgcctgttcccactgcacacccaccagggcacagggtagggatagtgccaggagggccacagctgcagggtccatcccaggccgtggtacacaggtagaggtgggtgccagccttcgtgaagcacctgcagaagctccactcagggagagaacgaggcactcgcccaaacagatcctgggtcacacggggcagcaagagagggtggagcaagtggcctggagcaaagggttggaggccccggggcggcgcgttctcccccaagcccattccagggccatgggcaccccccagaggcagctggtgggactgcagccatgcaggtcctagagggcaggtgacaggggacgtgacagaaggggacaaagggccggcaacatccctgggggaggcacagagagggccagactgccctcggtggactgcggaacccagaacccaacggccaatcctccccctactcctcacccacagtaaggggccagggctccatgcaatgagaacccacgggtgatgccacacgggggagaagccacgcgggggagaggccatgcaggggagaggttacaagggggagaggctgcggggtgagaggtcacatggggcagaggccacgcgggggagaggccacgcaggggagaggtcacatgggggaggccacgcaggggagaggtcacatgggggagaggccacacaagggagaggccatgcaggggagaggtcacaatggggagaggccgcaggggggagaggtcacatggggcagaggccacgcgggggagaggccacgcaggggagaggtcacatgggggaggacacgcaggggagaggtcacaagggggagaggccgcagggggagaggtcacatgggggagaggctacacaggggagaggccgcacgctggggagatggtccctgcgggaagactccgaggcagtctcctgcagctccttccggcgaatccggttcaggaagtaaaaccagccctgtgtagaggtaagtgatgcttgtggggataatctccgagcagctcaccgcggcgctggccattgccgttctcttcacggtagaagagtccatttggggaaaaggtccccatcagagatggagatgttccctttcagactccaggctatggctgtggggccggctccctaccacgtgggctgggggctgggcacatgcatgcccactcctgggccctcttcctggtaggccacagcaccacacacactgcaaaccaggcctcttcttcatccaccaccaccgtccaggcctcaacatcaccgcgtggggtcttgtgccctctgggggaacttccgggctaatgaggggggacagtccccattaccggtctatctttataaggcagtatatgcaacagtggaagttctgtgagacatgttccaaccccggggctgctggcagaactgtccccaaacccaccctcgatcccacggccaggaagtgggtccaaaattgcctggccaggtcacacccctgcgtgaaccgccccacaacacccagggcgctgcctgacttgccgtccacctctcagcccctcccctcacccctgccgcagctgcagggcctaccctcgccgggggctgctccctgcttacctccctcgcccgtgcaatgcctccacttcccgcaaggcctaccgggagatgttacaggtcacggtcatatttgagcatgagaagctcacgcagagaacattctggctgagggagaggtcttggggttcaaggctgtttcttggctctgctcagccatgccaggcaggaaaatgggcacctctagtgacccaggctggctgagagcctgcagggaagagcctttggaacgtgagccactgtgggctggcaggactgcaactggcgtctccatctactggtaccgaggcgaggaggaaaaagcaggggggcccggagacggcccctctaagtctgtaactccagagctgctgctcagtccccagaacgtcacctccgagcagagcctgtgacaactgtcaactgtgaagctgtggcgtgggttgctactgaagctctgaagtcagcgaggacacagcatgtttgttctagaccgtttggctgcgggaggaagctgtacatgcacacactcgcctcaccaccctgcgagtccacaggcccctccccggagtcacctccaggtaaagggggccctgcgtcgggacttgctctctggggcgctgagatgctctacaatgagctgtgctgcagtgcacggccgcccgactgtgcacccgcaacggggaactgaacgctgcatgaagtacatctccaagttgttctttaagaaggcttagggtccctggaagaccctcgcccacacccagcgtggagcgttgttgctcacgtggccacacctctcgggatggccgtgggtctccgtgatgggcaggcgagtggaaccacaggtgcttcccgtcctggtcacaaagtcagagtggctgggccaagtgtcctgagaagagtcacctcctgggatcccatcagcctggccatagcagaacacccagacaggggcccatccccgaggctcaactcaacgcatgcagccaccgtagaaaagtctggaaagtagttcttcaaccgactagacatggtgagcccaaaacccagccatgacactcctaggcatctgccccagaggaatgaaagcatccatcccctgcaaactcatccttacacagcagcgtgactcaagacggccaaaggcggaaacaccccaaacgtccatcagtggacaaacgggcagatgcaatgcactgtctgtaccgtgggatgtcactcagccatatgaaggaaagactccagtgtggatgagccctggaaccacggtgctgcgtgatcccgtaacacatggccagaacagacacggcccggaacctgaggccgggaggatgcgtgcaggtggcggggagacagaggggcgatggcccagtttcttttgggctgaaaatggtctaaagttgactgtggtgatggctgtacaactctgaatatgctgaaaactcgaattacacacttcagttgggcgaactgtactccatgtgaattacctctcgatggttctctcctgggctcaggcgcttctcccaccttggcctcctgagtagctggaactaccattcatgtgcggaaataaaacaactcggtctcaaaaaaactcaactcaaaactcagtctcaaaaaaataaaaaagtaaaagaggc

SEQ ID NO: 397 - DNA, 3008 bp, Homo sapiens
gttctcctcaactggcggcggcgcgaacgaatagtcgccggcgacctgtgagggcactcggaagggcgaggggagggctcgaccgctcgcgcctagtttttctatctctcccggagcctgagtctctgagccgtccccagcaaacgctcaggggctgcagaggccccgagagcttggctctctggcagatttcctctagtaagaggtggctctggaggccccgcgaaacgagtgtggtgtgtggttgcaaggcatgatggctgcaaaagtggttcctatgcccccaaagccaaagcagtcctttatactgagagttccgccagactccaagctgggccaagacctacttcgagatgccactaacgggcccaagaccatccaccagctagtgctggagcacttcctcaccttcttgcccaagccaagcctggtccagcccagtcagaaagtcaaggagaccttggttattatgaaagatgtgagctcaagccttcagaacagagtgcatcctcgtcccttggtgaagcttctgcccaaaggagtccaaaaggaacaagagacagtgtctctgtatttgaaagctaaccctgaggagctggtggtctttgaggatttgaatgtatttcactgccaggaagaatgtgtgagcttggatcctactcaacaactcacgtcagagaaggaagatgacagcagtgtcggggaaatgatgttactggcagtcaatggcagtaatcctgaaggtgaagatcctgagagggaacctgtagaaaatgaagattatagagaaaagtcttcagatgatgatgaaatggattcttccttggtctctcagcagcctcccgataaccaggaaaaggaacgactaaatacatccattccacaaaaaaggaaaatgagaaatctgttagttaccattgagaatgatactcctctagaggaactctcaaaatatgtagacatcagtattattgcccttactcgaaatcggaggacaaggagatggtacacttgtccactgtgtgggaaacagtttaatgaaagttcttacctcatttcccaccagaggacccacactggagaaaaaccctatgactgtaatcactgtgggaaaagcttcaatcataaaacaaacctcaataaacatgagcgaattcatacaggagagaaaccttattcctgttctcagtgtggaaaaaacttccgtcagaattctcatcggagtcgtcatgaaggaatccatataagggagaagatatttaagtgtccagaatgtgggaaaaccttcccaaagaatgaggagtttgtgcttcatctgcagagtcatgaggctgagagaccatatggttgcaaaaaatgtgggagaagatttggtcggctgtcaaactgtacccggcatgagaaaacccactcagcctgtaagacccgaaagcagaagtaatactgggaaccctttctgggtctgatggtgctgcctcaacctgagagctttcataagtagttctgaattcccaagctgcctaaaaaggtataaatgtgtaaaaatctcattattgccaaaattggataaatgcccatcttagctaaaacctcaaattgctagaaaattcacagggaagaaaacatttcaagggctatacctcagcatctaggctttttggactaaggagctttcctttttgaagttatatgataatgtacaggtcacagatcccctttcccaacactttgaagatgaatctggagtctgcttacttggaaggcaaagagtgacttgtgtctattgaaagtatatccgttttccccccacatggggattcatacttgagaaatagtgcaaagatgcttatctggaactgtgttctggtgaaagaaccaaattactggcttgttagccaacagcttctgatagcaattcatataaccctctaagaatacctgtttaagtcttgagtgttgaaaggaattgtttactttggaatataggaaaacagttgaatgtcagactctcatttgtatgtgatctaaatttgcaatcaatttcaataatatttacaatttgtgataaaactgacttttacagattccttttcacaacataatttaggtgtctactgttcttattgtattttgttctgctgttgatctctccagcagccgtctcatgcttctcccttgctaaaagaagtttggattactcaggcagggccatccagccccaccactagaaaagctcttcagaatcttgtccctctgttgagcccagatctcatgtgctacgaaggaaaccccaagacccagagaggaagggtcaacctggaggcaggaaaaagttggcttggatccatgtctcatcaataaccttaccatatgcttaggtcccctctatgctgtcatcagacctttggcaatggggtggtcactacctcacaaggcaaagtgttgtatgattagaaattacgtctccagtggttagctcacattgcctctcaagagacaggtttccaggtgtcttcattgtagtgggtattaattgtcttcagcctcttgatatccataccttcctgtcctctgcctagaagcaaggccagcggtgcctttacggactgatcgtgtggtgcgatttagggattcttcagttttgcttgctttaggtttccaaaagttatacattggtgttttgattggaataaagaaatcctataagctatttgggaaaaattatagtgtatgtttcccatccagaaacatgcctttctatttattagagtattatattcctgtgaaaatttttctaattttcttcacttgttttacacaattttgttattgtagttttttccattatatttttatagttgattattgcttttacatgggaaagttatttttaattatatatttgtatagtcatctcactgttgttaattttcaatagtttgttggtttagttctgttaacttttggtaaaatgacaccatctacaaagaatagtttttgtttcttgc

SEQ ID NO: 398 - DNA, 8126 bp, Homo sapiens
gaggtgaccacaacatggctgcggcgcctgggctgctcgtctggctgctcgtgctccggctgccctggcgggtgccgggccagctggaccccagcactggccggcggttctcggagcacaaactctgcgcggacgacgaatgcagcatgttaatgtaccgcggtgaggctcttgaagatttcacaggcccggattgtcgttttgtgaattttaaaaaaggtgatcctgtatatgtttactataaactggcaagaggatggcctgaagtttgggctggaagtgttggacgcacttttggatattttccaaaagatttaatccaggtagttcatgaatataccaaagaagagctacaagttccaacagatgagacggattttgtttgttttgatggaggaagagatgattttcataattataatgtagaagaacttttagggtttttggaactgtacaattctgcagctacagattctgagaaagctgtagaaaaaactttacaggatatggaaaaaaaccctgaattatctaaggaaagggaacctgaacctgaaccagtagaagccaactcagaggaaagtgatagtgtattctcagaaaacactgaggatcttcaggaacagtttacaactcagaagcaccactcccatgcaaacagccaagcaaatcatgctcagggagagcaggcttcatttgaatcttttgaagaaatgctgcaagataaactaaaagtgccagaaagtgaaaacaacaaaaccagcaatagttctcaggtctcaaatgaacaggataagattgatgcctataaacttttgaaaaaagaaatgactctagacttgaaaaccaaatttggctcaacagctgatgcacttgtatctgatgatgagacaaccagactcgttacttcattagaagatgattttgatgaggaattggatactgagtattatgcagttggaaaggaagatgaggagaaccaagaagactttgatgagttgccattacttacctttacagatggggaagatatgaaaactccagcaaagtctggcgttgagaaatatccaacagataaagagcagaattcaaatgaagaggacaaggttcagctaactgtgccccctggcatcaaaaatgatgataaaaatatactaacaacctggggggacactatcttctctattgtcacaggaggtgaagaaacaagagatacgatggatttagagagctctagttcagaggaagaaaaagaagatgatgatgatgcattagtcccagatagcaaacaggggaaaccacagtcagcaacagattatagtgaccctgacaatgtagatgatggtctttttattgtagacattcctaaaacaaataatgacaaagaagtaaacgcagaacatcacattaaaggaaaagggaggggagttcaggaatccaagaggggcctggtacaagataagacagaattagaggatgaaaatcaagaaggcatgactgtgcacagttctgttcacagcaataacctcaactctatgccagctgctgaaaagggtaaagacacattaaaatcagcttatgatgatacagaaaatgacctaaaaggagcagctattcatatctcaaaaggaatgctccacgaagaaaagcctggagagcagattttggaaggtggctcagagagtgaatctgcacagaaagctgcagggaatcaaatgaatgacagaaagattcaacaggaatccctgggtagtgcaccactcatgggagatgaccaccctaacgcatccagagacagtgtggagggagacgctttggtaaatggggccaaactgcacacgctttcagtggagcatcaacgtgaggaattgaaagaggaattagttcttaaaactcaaaaccaacctagattctcctctccagatgagattgatttgcccagagaactggaagacgaggttcccattctgggaagaaatcttccctggcaacaagaaagagatgtggctgccacagccagtaagcaaatgagtgagaagataaggctctctgagggagaagccaaagaggactccttggatgaagagttttttcatcacaaggcaatgcagggcacagaggtaggacagacagaccaaactgacagcacaggaggaccagctttcctttctaaagtagaagaggatgattatccctctgaagaactactagaggatgaaaacgctataaatgcaaaacggtctaaagaaaaaaaccctgggaatcagggcaggcagtttgatgttaatctgcaagtccctgacagagcagttttagggaccattcatccagatccagaaattgaagaaagcaagcaagaaactagtatgattttggatagcgaaaaaacaagtgagactgctgccaaaggggtcaacacaggaggcagggaaccaaatacaatggtggaaaaagaacgccctctggcagataagaaagcacagagaccatttgaacgaagtgacttttctgacagcataaaaattcagactccagaattaggtgaagtgtttcagaataaagattctgattatctgaagaacgacaaccctgaggaacatctgaagacctcagggcttgcaggggagcctgagggagaactctcaaaagaggaccatgagaacacagagaagtacatgggcacagaaagccaggggtctgctgctgcagaacctgaagatgactcgttccactggactccacatacaagtgtagagccagggcatagtgacaagagggaggacttacttatcataagcagcttctttaaagaacaacagtctttgcagcggttccagaagtactttaatgtccatgagctggaagccttgctacaagaaatgtcatcaaaactgaagtcagcgcagcaggagagcctgccctataatatggaaaaagtcctagataaggtcttccgtgcttctgagtcacaaattctgagcatagcagaaaaaatgcttgatactcgtgtggctgaaaatagagatctgggaatgaacgaaaataacatatttgaagaggctgcagtgcttgatgacattcaagacctcatctattttgtcaggtacaagcactccacagcagaggagacagccacactggtgatggcaccacctctagaggaaggcttgggtggagcaatggaagagatgcaaccactgcatgaagataatttctcacgagagaagacagcagaacttaatgtgcaggttcctgaagaacccacccacttggaccaacgtgtgattggggacactcatgcctcagaagtgtcacagaagccaaatactgagaaagacctggacccagggccagttacaacagaagacactcctatggatgctattgatgcaaacaagcaaccagagacagccgccgaagagccggcaagtgtcacacctttggaaaacgcaatccttctaatatattcattcatgttttatttaactaagtcgctagttgctacattgcctgatgatgttcagcctgggcctgatttttatggactgccatggaaacctgtatttatcactgccttcttgggaattgcttcgtttgccattttcttatggagaactgtccttgttgtgaaggatagagtatatcaagtcacggaacagcaaatttctgagaagttgaagactatcatgaaagaaaatacagaacttgtacaaaaattgtcaaattatgaacagaagatcaaggaatcaaagaaacatgttcaggaaaccaggaaacaaaatatgattctctctgatgaagcaattaaatataaggataaaatcaagacacttgaaaaaaatcaggaaattctggatgacacagctaaaaatcttcgtgttatgctagaatctgagagagaacagaatgtcaagaatcaggacttgatatcagaaaacaagaaatctatagagaagttaaaggatgttatttcaatgaatgcctcagaattttcagaggttcagattgcacttaatgaagctaagcttagtgaagagaaggtgaagtctgaatgccatcgggttcaagaagaaaatgctaggcttaagaagaaaaaagagcagttgcagcaggaaatcgaagactggagtaaattacatgctgagctcagtgagcaaatcaaatcatttgagaagtctcagaaagatttggaagtagctcttactcacaaggatgataatattaatgctttgactaactgcattacacagttgaatctgttagagtgtgaatctgaatctgagggtcaaaataaaggtggaaatgattcagatgaattagcaaatggagaagtgggaggtgaccggaatgagaagatgaaaaatcaaattaagcagatgatggatgtctctcggacacagactgcaatatcggtagttgaagaggatctaaagcttttacagcttaagctaagagcctccgtgtccactaaatgtaacctggaagaccaggtaaagaaattggaagatgaccgcaactcactacaagctgccaaagctggactggaagatgaatgcaaaaccttgaggcagaaagtggagattctgaatgagctctatcagcagaaggagatggctttgcaaaagaaactgagtcaagaagagtatgaacggcaagaaagagagcacaggctgtcagctgcagatgaaaaggcagtttcggctgcagaggaagtaaaaacttacaagcggagaattgaagaaatggaggatgaattacagaagacagagcggtcatttaaaaaccagatcgctacccatgagaagaaagctcatgaaaactggctcaaagctcgtgctgcagaaagagctatagctgaagagaaaagggaagctgccaatttgagacacaaattattagaattaacacaaaagatggcaatgctgcaagaagaacctgtgattgtaaaaccaatgccaggaaaaccaaatacacaaaaccctccacggagaggtcctctgagccagaatggctcttttggcccatcccctgtgagtggtggagaatgctcccctccattgacagtggagccacccgtgagacctctctctgctactctcaatcgaagagatatgcctagaagtgaatttggatcagtggacgggcctctacctcatcctcgatggtcagctgaggcatctgggaaaccctctccttctgatccaggatctggtacagctaccatgatgaacagcagctcaagaggctcttcccctaccagggtactcgatgaaggcaaggttaatatggctccaaaagggccccctcctttcccaggagtccctctcatgagcacccccatgggaggccctgtaccaccacccattcgatatggaccaccacctcagctctgcggaccttttgggcctcggccacttcctccaccctttggccctggtatgcgtccaccactaggcttaagagaatttgcaccaggcgttccaccaggaagacgggacctgcctctccaccctcggggatttttacctggacacgcaccatttagacctttaggttcacttggcccaagagagtactttattcctggtacccgattaccacccccaacccatggtccccaggaatacccaccaccacctgctgtaagagacttactgccgtcaggctctagagatgagcctccacctgcctctcagagcactagccaggactgttcacaggctttaaaacagagcccataaaactatgacctctgaggtttcattggaaagaaagtgtactgtgcattatccattacagtaaaggatttcattggcttcaaaatccaaaagtttattttaaaaggtttgttgttagaactaagctgccttggcagtgtgcatttttgagccaaacaattcaaaaatgtcatttcttccctaaataaaaatcaccttttaagctagagcgtccttacaactttgaaatgtgcaataaagaatacctgtgttttagctaatgtagcatatgtaattgcaaaatgatttagaatgtcatgaaaaatatgaacatttcctgtggaaatgctttaagaacatgtatttccattatcctatttttagtgtacaccagctgaatacggagcaatggtgtttataagcgtttttttaaactatctggtcacaaagactgttacgctaaaaatgtttactaaaagatcactaaactatctcccctcttgctgaagttctttgtagtaatagctcataaaaatttgtttattaatatttcccaagtgtctgttgactcattggactgttatgaggcttgtgccatttggggaacatgtaaactcaggctcccagaactgaagatggtggctggtggcacacttccggctgctcctccgtcacctgtgaactctacaagtgacgtctttttatttcaaagaagtttatttcccacttgtatagcattcacatgctttctttacgatcctcattgtctatttgagaatggttttctgagagtgagtttacattagtagcaagagttgtttgacctgatgttccattgtttttaccattcctgtagaaaaagggtgcacaacagaaaaatgaaaatgatgtgtcatggccataaaagtatagaaatctttaaaaattttaaaatgtacagtcccttatctatctttcccattccttgccactgatttttgaggaatataataaaaagattggaagagtataatgccatgagaaagaatgatttaggactgtgagggttataacatgccctaggtcagcaaccaagggttgaaatcagttctgttttagggggaaatgggggcgacagatattattccaaaattaatattaattaatatttaaacgttggtgtttttatttaaaaatcagtaactaaccatctggaattgcaccatacttaaagtcttatccattactacactgtctttaaaacaatgtttctttaaatactctacaacgtttctaagaacgaacttcagacattttaattacagtaataatagcactccttttaaggagtttcagatccacactaaaactaaaatcataaaaggctgatacttttgtttgctgctaggctatattcttccattctttgaagtcctatgatgtaatatttttgaaacctagtgtatgtcttgtcactgttgtgatatttaatcgattaagaataccttgtaaaaaggagcaaaagcttcaatgtgaaacaattttctctctttatactaaacaactgaagatagatagtttagaaagataaggacctttgaaagaagacaactctgtcaaagttcataaggaatataaaaattcttcaggaaaagagaattcaatctatatgtcctcccgtttaatatcaagaatagaagaaattaagaggaaaactccacagaagagcataggccacttttagccatgtaaaaataagattaagtcacaaatacaacttttgaatttacctgtcaatatctctttaggacacaaaacaatgctgaagttaatataatttctaattttaaatgtcatttaagtgtagattatgccatctaggaaggtaagtaggaaaggtaaattaaatctatttttaaaattcaaaatattagagtatttttcccctctaaagccttttttggtgattattctgtatctgacataattgagaaactggtaagctgtaaagattccagtgtagcttctctgagaagttgtgagccagtccataactgcttcctcacatccatctgattgcaccatttctgcagcaaaccccaaagcagggtgccaatatgcagatggcatagggagtatcatccctcagccaaatcacttttccatctctaaagtttcatctattttggaagtcatctccaactaattgtgtctggatttagttgctaaaattgtcttatttatgaagcagcaatattcagcctgaaagcatttctgccatagttgttgtagttatatcgccaatggctgatttttttcattggaaagtaaatttaagtaattcgtgggatgtggtatattctgtgtcaacttcaagataatcactcattttctcgttatattcaggtctgaattaaagttaagttaatcaca

SEQ ID NO: 399 - DNA, 2556 bp, Homo sapiens
gagtcgccgagcagcccgctctccatgtgacttcagtttccgtccgttccttccgctggtgctaaaataatctgatgccccacagcaaggaggtagcccagccccgcgttcggctgctctcgaggaggccggagcccccggagacgatgcgccccgcgcagccgcctgcgcctgcgggagccggctgcccttgagatggagttgctgcctctttggctctgcctgggttttcacttcctgaccgtgggctggaggaacagaagcggaacagccacagcagcctcccaaggagtctgcaagttggtgggtggagccgctgactgccgagggcagagcctcgcttcggtgcccagcagcctcccgccccacgcccggatgctcaccctggatgccaaccctctcaagaccctgtggaatcactccctccagccttaccctctcctggagagcctcagcctgcacagctgccacctggagcgcatcagccgcggcgccttccaggagcaaggtcacctgcgcagcctggtcctgggggacaactgcctctcagagaactacgaagagacggcagccgccctccacgccctgccgggcctgcggaggctggacttgtcaggaaacgccctgacggaggacatggcagccctcatgctccagaacctctcctcgctgcggtccgtgtccctggcggggaacaccatcatgcggctggacgactccgtcttcgagggcctggagcgtctccgggagctggatctgcagaggaactacatcttcgagatcgagggcggcgctttcgacggcctggctgagctgaggcacctcaacctggccttcaacaacctcccctgcatcgtggacttcgggctcacgcggctgcgggtcctcaacgtcagctacaacgtcctggagtggttcctcgcgaccgggggagaggctgccttcgagctggagacgctggacctgtctcacaaccagctgctgttcttcccgctgctgccccagtacagcaagttgcggaccctcctgctgcgcgacaacaacatgggcttctaccgggacctgtacaacacctcgtcgccgagggagatggtggcccagttcctcctcgtggacggcaacgtgaccaacatcaccaccgtcagcctctgggaagaattctcctccagcgacctcgcagatctccgcttcctggacatgagccagaaccagttccagtacctgccagacggcttcctgaggaaaatgccttccctctcccacctgaacctccaccagaattgcctgatgacgcttcacattcgggagcacgagccccccggagcgctcaccgagctggacctgagccacaaccagctgtcggagctgcacctggctccggggctggccagctgcctgggcagcctgcgcttgttcaacctgagctccaaccagctcctgggcgtcccccctggcctcttcgccaatgctaggaacatcactacacttgacatgagccacaatcagatctcactttgtcccctgccagctgcctcggaccgggtgggcccccctagctgtgtggatttcaggaatatggcatctttaaggagcctgtctctggagggctgtggcctgggggcattgccagactgcccattccaagggacctccctgacctacttagacctctcaagcaactggggggttctgaatgggagcctcgccccactccaggatgttgcccccatgttacaggtcctgtctctcaggaacatgggcctccactccagctttatggcgttggacttctctgggtttgggaatctcagggacttagatctgtcggggaattgcttgaccaccttcccaaggtttgggggcagcctggccctggagaccctggatctccgtagaaactcgctcacagcccttccccagaaggctgtgtctgagcagctctcgagaggtctgcggaccatctacctcagtcagaatccatatgactgctgtggggtggatggctggggggccctgcagcatgggcagacggtggccgactgggccatggtcacctgcaacctctcctccaagatcatccgcgtgacggagctgcccggaggtgtgcctcgggactgcaagtgggagcggctggacctgggcctgctctacctcgtgctcatcctccccagctgcctcaccctgctggtggcctgcactgtcatcgtcctcacttttaagaagcctctgcttcaggtcatcaagagccgctgccactggtcctccgtttactgacctggctgtgtgccaagactcgaaattcggtccgcacacaacaggacactttctctgccagctttcaagatgtgatgcagaggccaagtctgacgaattgaagtttcaattaaaatttaatatgtttccattcctcatcgcccaccccacccccgcccccaccaccgcccaagttctttttccatcattataattcatcctcattatcttggtaaaatatttattaagtgactttttcagaaataaaaggcaacgtgtctcataaatattttttaaattaaa

SEQ ID NO: 400 - DNA, 3360 bp, Homo sapiens
gaaactcaaccgaaagcctgcagagagcagaacatggaaggagacttctcggtgtgcaggaactgtaaaagacatgtagtctctgccaacttcaccctccatgaggcttactgcctgcggttcctggtcctgtgtccggagtgtgaggagcctgtccccaaggaaaccatggaggagcactgcaagcttgagcaccagcaggccaatgagtgccaggagcgccctgttgagtgtaagttctgcaaactggacatgcagctcagcaagctggagctccacgagtcctactgtggcagccggacagagctctgccaaggctgtggccagttcatcatgcaccgcatgctcgcccagcacagagatgtctgtcgcagtgaacaggcccagctcgggaaaggggaaagaatttcagctcctgaaagggaaatctactgtcattattgcaaccaaatgattccagaaaataagtatttccaccatatgggtaaatgttgtccagactcagagtttaagaaacactttcctgttggaaatccagaaattcttccttcatctcttccaagtcaagctgctgaaaatcaaacttccacgatggagaaagatgttcgtccaaagacaagaagtataaacagatttcctcttcattctgaaagttcatcaaagaaagcaccaagaagcaaaaacaaaaccttggatccacttttgatgtcagagcccaagcccaggaccagctcccctagaggagataaagcagcctatgacattctgaggagatgttctcagtgtggcatcctgcttcccctgccgatcctaaatcaacatcaggagaaatgccggtggttagcttcatcaaaaggaaaacaagtgagaaatttcagctagatttggaaaaggaaaggtactacaaattcaaaagatttcacttttaacactggcattcctgcctacttgctgtggtggtcttgtgaaaggtgatgggttttattcgttgggctttaaaagaaaaggtttggcagaactaaaaacaaaactcacgtatcatctcaatagatacagaaaaggcttttgataaaattcaacttgacttcatgttaaaaaccctcaacaaaccaggcgtcgaaggaacatacctcaaaataataagagccatctatgacaaaaccacagccaacatcatactgaatgagcaaaagctggagcattactcttgagaagtagaacaaggcacttcagtcctattcaacatagtactggaagtcctcgccacagcaatcaggcaagagaaagaaataaaaggcaaccaaaaagaaaggaagtcgaagtatctctgtttgcagacgatatgattctatatctagaaaaccccatgatcttggcccaaaagctcctagatctgataaacaacttcagctaactttcaggagacaaaatcaatatacaaaatatggtagcatttttatacaccaacgacatccaagctgagagccaaatcaagaatgcaatcctattcacaattgccacaaaaagaataaaatacctaggaatacagctaaccagggagatgaaagatctctacaacaaaaattacaaaacactgctgaaagaaatcagagatgacacaaatggaaaaacattccatacttatggataggaagaatcaatattgttaaaatggccatactacccaaagcaatttatagattcaatgctattcctatcaaactaccaataacattcttcacagaatcagaaaaaaaaagcattaaaatttatttgaaaccaaaaaagagcccaaaaagccaaagcaatcctaagcaaaaagaacaaagctggaggcatcgcattacccaacttcaaactatactacagggctacagtaaccaaaactgcatgatactggtacaaaagcatggtgctggtacaaaagcagacacatagatcaatggaacagaatagagggcccagaaataaagctacacacctacaaccatctaatctttgacaaagttgacaaaaatacgcaatggggaaagaattccccattcagtaagtggtactgggataactagctagccatatgcagaggattgaaactgaaccacttccttacaccatatgcaaaaatcaactcaagatggattaaagacttaaatgtaaaaccccaaactataaaaactctggaagataacctaggcaataccattctggacataggaacggaaaaagatttcatgacaaagatcccaaaaataattgtaacgaaagcaaaaattgacaaatgggacatgattaaacagaattaccatttgactcagcaatcccattattggttatatacccaaaggaatctaaatcattctgtcataaagacatatatacacaaatgttcacggcagcactatacacaatcgcaaagtcagggaatcaaactaaatgtccatcagtggtagaaaggataaagaaaatgtggtggcagggagtggtggctcatgtctgtaatcccagcactttgggaggctgaggcgggtggttcacctgaggtcaggagtttgagaccagcctggccaacatggagaaactccgtctccgctaaaaatacgaaaattagccaggcgtggtggcgagcacctgtcatcccagctacttgggaggcctaggcgtgagaatcgcttgaacctggaaggtggtggttgcagtgagccgagatcctgccactgcactccagcctgggcaaccaagcgagactctgccttaaaaaaaaaaaaaagaaaatgtggcacatatacaccatggaatactatgcagccataaaaaagaatgggatcatgtcctgtgcagcaacgtggatggagctggaagccattatcctaaatgaactcactcagaaacagaaaaccaaataccacatgttctcacttataagtagaagctaaacattgagtacacatggatacaaagaagggaaccgcagacactggggcctacctgaggtcggagcatggaaggagggtgaggatcaaaaaactacctatctggtactatgctttttatctggatgatgaaataatctgtacaacaaaccctggtgacatgcaatttacctatatagcaagcctacacatgtgcccctgaacctaaaaaaaaagttaaaagaaaaacgtttggattattttccctctttcgaacaaagacattggtttgcccaaggactacaaataaaccaacgggaaaaaagaaaggttccagttttgtctgaaaattctgattaagcctctgggccctacagcctggagaacctggagaatcctacacccacagaacccggctttgtccccaaagaataaaaacacctctctaaaa

SEQ ID NO: 401 - DNA, 2822 bp, Homo sapiens
ccgtggccgcggcgtggcggggccggggcggagctggcgtcgcccggggcaggagggcagccgcggccggcaggacaggcagacggacaggctgacaggagagagaacaggcactgcgggacctgcaggagaaaggcgatcctgtggctgggaatgtgaccccacggccagaagaggacccggtatcctcaggtccgagcccctggacagcagccccaggcccagctggccatggccctgtgcctgaagcaggtgttcgccaaggacaagacgttccggccgcggaagcgctttgagccgggcacacagcgctttgagctgtacaagaaggcacaggcctctctcaagtcgggcctggacctgcgcagtgtggtgaggctaccacccggggagaacatcgacgactggatcgccgtgcacgtggtggacttcttcaaccgcatcaacctcatctacggcactatggcggagcgctgcagtgagaccagctgcccggtcatggccggcgggccccgctacgagtaccgctggcaggacgagcgccagtaccggcggcccgccaagctctctgcgccgcgctatatggcattgctcatggactggatcgaaggcctcatcaacgacgaagaggtctttcccacgcgtgttggagttcccttccctaagaacttccagcaggtctgcaccaagatcctgacccgcctcttccgagtctttgtccatgtctacatccaccacttcgatagcatcctcagcatgggggcagaggcgcacgtcaacacctgctacaagcacttctactacttcatccgcgagttcagtctggtggaccagcgggagctggagccactgagggagatgacagagcggatctgccactgagcccaggtctggacttttttggccatcagatggacgatctgaacatagggtggctggcagaggggacccccaggagcctgaaggaatctgaaggcactggaatcactccacacacccaaagcctctggacttctggttctcaggagtctgcctacctgtcgccctgaccgcttgtggatggagaaggggagagcatctaggcaggcaaacagaagggaagtggagttaaacctctggcatgaagtctgggagtagggtaggctagggggtttcttctatgacacttgacccttccatgctggttcccaagcctattggaggaatgtgggtgtggccgaggtgatggcaagaaaggtgcaagaaagtgagcagtctgcctgtgagtgagcacagatgccggggtgtgtgtgtgtgtgtgtgattttcactgtggggtgtgtctgtgagagctagctgccttacccctccttggcacatagtaggccttccataaatgttggatggatggataaatagattgggaccatcagaccatgggaccatcagaccatgaccactgtaggagtgatgacagctcagcgtccccactcagtgtatctgaccatgtgtgtaagtgcacaaaaatgtggttgtagatgttgctctacattcaaaccttccaggctacactcttccatcagcatgagtcctggagagctgggggaacgtaggaagaggagccttgccttgagttcctaaaccgacccactgcagacacaggctctgattctcttacccagagatgcccatgagctgacattttactcatccctctgcctccaagaaggcctgtattatacgtgtcctcctgggggttggagatgatccctcaagtacacaaaggtcccctggcccttcatctgggaatcatatactccactctagctcccagaatctacagacctggctcctcggatctgaagcccagcacaaaataatctccccgtccaaggagcttgtggaacttgaattgggaactttggagtcttgtctcccatcccagcacattgaggatgtagttggtgaatggactcttccaggcatggagatcctccatcctaaaagtacctgcctccttcccagccatccctgacacattccagccagttggatctcacagcacagctatccacagggagactgggatgttcacgcagcactccattactcagtacctccatacccagccctatacgcagacccacaggtggggaaactgaggcaggaacagggttctgccctcccagagcctccactctgggatgccagaatggaaagccagagggaacctgagaatcatccagtcttactgtctcaatgtacatacggggaaactgaagccaggagaagaagagggagaaactgtccagggcctcacagggaggcattcatggagctggagaaaccagggatcctgaccgcagggcccatcaattgctacatagagatacacatggaaagagggtttaacagaccctctctaggacacaactgtttctgctttgagcaataatttctaacctgaggccaacatgtcccactgccccttgggttggctggggttgtttcctgagccaagcatccaatatcatgccccactcaatggcctagaagctgcctgtactttggggaaacagatggagctcttgggcccagccagctgggcctgggacttctgcctctgccgcctccagagtggcctggcagctttgccagaggctgtggagcgagggtagtaggagcttttcccagagtgctgtgacttgcatgatggattctaggctgtggcaagggctgatttctgggatagggggagggttggaaaatttatttttatgaaacagagggaagactttattgttgttatttttggtaaaataaaaggcaaactaaagcagcca

SEQ ID NO: 402 - DNA, 3249 bp, Homo sapiens
cgcacgcggaaccggcgcgggcacctggggagaaatggatggagaagggacctggctggaaagcctttgccccgctgctctgctccgcccataagaggacccctgaaatgtcccgtgcagtttgttcaagtcccctgtgtgatgaaatgtgcctctcgccttacccgtgtgagaatacctgtggtgtggcagcgagtattttggtatttgacctgtccaaagacgacttgatacctctataatgtaacagaaaaggtcagaaaatattaagcaagtagaagtgtggagcatattaagcaagatgaacatctcgggaagcagctgtggaagccctaactctgcagatacatctagtgactttaaggacctttggacaaaactaaaagaatgtcatgatagagaagtacaaggtttacaagtaaaagtaaccaagctaaaacaggaacgaatcttagatgcacaaagactagaagaattcttcaccaaaaatcaacagctgagggaacagcagaaagtccttcatgaaaccattaaagttttagaagatcggttaagagcaggcttatgtgatcgctgtgcagtaactgaagaacatatgcggaaaaaacagcaagagtttgaaaatatccggcagcagaatcttaaacttattacagaacttatgaatgaaaggaatactctacaggaagaaaataaaaagctttctgaacaactccagcagaaaattgagaatgatcaacagcatcaagcagctgagcttgaatgtgaggaagacgttattccagattcaccgataacagccttctcattttctggcgttaaccggctacgaagaaaggagaacccccatgtccgatacatagaacaaacacatactaaattggagcactctgtgtgtgcaaatgaaatgagaaaagtttccaagtcttcaactcatccacaacataatcctaatgaaaatgaaattctagtagctgacacttatgaccaaagtcaatctccaatggccaaagcacatggaacaagcagctatacccctgataagtcatcttttaatttagctacagttgttgctgaaacacttggacttggtgttcaagaagaatctgaaactcaaggtcccatgagcccccttggtgatgagctctaccactgtctggaaggaaatcacaagaaacagccttttgaggaatctacaagaaatactgaagatagtttaagattttcagattctacttcaaagactcctcctcaagaagaattacctactcgagtgtcatctcctgtatttggagctacctctagtatcaaaagtggtttagatttgaatacaagtttgtccccttctcttttacagcctgggaaaaaaaaacatctgaaaacactcccttttagcaacacttgtatatctagattagaaaaaactagatcaaaatctgaagatagtgcccttttcacacatcacagtcttgggtctgaagtgaacaagatcattatccagtcatctaataaacagatacttataaataaaaatataagtgaatccctaggtgaacagaataggactgagtacggtaaagattctaacactgataaacatttggagcccctgaaatcattgggaggccgaacatccaaaaggaagaaaactgaggaagaaagtgaacatgaagtaagctgcccccaagcttcttttgataaagaaaatgctttcccttttccaatggataatcagttttccatgaatggagactgtgtgatggataaacctctggatctgtctgatcgattttcagctattcagcgtcaagagaaaagccaaggaagtgagacttctaaaaacaaatttaggcaagtgactctttatgaggctttgaagaccattccaaagggcttttcctcaagccgtaaggcctcagatggcaactgcacgttgcccaaagattccccaggggagccctgttcacaggaatgcatcatccttcagcccttgaataaatgctctccagacaataaaccatcattacaaataaaagaagaaaatgctgtctttaaaattcctctacgtccacgtgaaagtttggagactgagaatgttttagatgacataaagagtgctggttctcatgagccaataaaaatacaaaccaggtcagaccatggaggatgtgaacttgcatcagttcttcagttaaatccatgtagaactggtaaaataaagtctctacaaaacaaccaagatgtatcctttgaaaatatccagtggagtatagatccgggagcagacctttctcagtataaaatggatgttactgtaatagatacaaaggatggcagtcagtcaaaattaggaggagagacagtggacatggactgtacattggttagtgaaaccgttctcttaaaaatgaagaagcaagagcagaagggagaaaaaagttcaaatgaagaaagaaaaatgaatgatagcttggaagatatgtttgatcggacaacacatgaagagtatgaatcctgtttggcagacagtttctcccaagcagcagatgaagaggaggaattgtctactgccacaaagaaactacacactcatggtgataaacaagacaaagtcaagcagaaagcgtttgtggagccgtattttaaaggtgatgaaagagagactagcttgcaaaattttcctcatattgaggtggttcggaaaaaagaggagagaagaaaactgcttgggcacacgtgtaaggaatgtgaaatttattatgcagatatgccagcagaagaaagagaaaagaaattggcttcctgctcaagacaccgattccgctacattccacccaacacaccagagaatttttgggaagttggttttccttccactcagacttgtatggaaagaggttatattaaggaagatcttgatccttgtcctcgtccaaaaagacgtcagccttacaacgcaatattttctccaaaaggcaaggagcagaagacatagacgttgaaacagaaacagaaggatgaaggacagttttttccttcttagttatttatagttaaagttggtactaaacattgatttttttgatcttctgtaaatggatttataaatcagttttctattgaaaatgtttgtgatattttgcttttgcacctttaaaacaataaggcgctttcattttgcactctaacttaagagtttttactttatgtagtgatacctaatacaattttgaaaatacaaaaaaaaaa

SEQ ID NO: 403 - DNA, 5470 bp, Homo sapiens
agacgctgctgtggctgcgccgggctgcgacactgcagttgtctacgcggccggggccgggacgaggaggcgttggacggggtcgcatacgttcgtcccctcgcattgcggccccgacagctgcgccaggatccccgggcggcggcgcggggcgtgaacgctctggggctcagccaggcctgcgcgggcccgaggccggaggaacccggactccggcgtagcggttttgacacaagggcgcatatcttcaaagcacctagtacctcctaccattgtcaactgattctcgctgaagtctgttaattctactttttgagtacttatgaataaccacgtgtcttcaaaaccatctaccatgaagctaaaacataccatcaaccctattcttttatattttatacattttctaatatcactttatactattttaacatacattccgttttattttttctccgagtcaagacaagaaaaatcaaaccgaattaaagcaaagcctgtaaattcaaaacctgattctgcatacagatctgttaatagtttggatggtttggcttcagtattataccctggatgtgatactttagataaagtttttacatatgcaaaaaacaaatttaagaacaaaagactcttgggaacacgtgaagttttaaatgaggaagatgaagtacaaccaaatggaaaaatttttaaaaaggttattcttggacagtataattggctttcctatgaagatgtctttgttcgagcctttaattttggaaatggattacagatgttgggtcagaaaccaaagaccaacatcgccatcttctgtgagaccagggccgagtggatgatagctgcacaggcgtgttttatgtataattttcagcttgttacattatatgccactctaggaggtccagccattgttcatgcattaaatgaaacagaggtgaccaacatcattactagtaaagaactcttacaaacaaagttgaaggatatagtttctttggtcccacgcctgcggcacatcatcactgttgatggaaagccaccgacctggtccgagttccccaagggcatcattgtgcataccatggctgcagtggaggccctgggagccaaggccagcatggaaaaccaacctcatagcaaaccattgccctcagatattgcagtaatcatgtacacaagtggatccacaggacttccaaagggagtcatgatctcacatagtaacattattgctggtataactgggatggcagaaaggattccagaactaggagaggaagatgtctacattggatatttgcctctggcccatgttctagaattaagtgctgagcttgtctgtctttctcacggatgccgcattggttactcttcaccacagactttagcagatcagtcttcaaaaattaaaaaaggaagcaaaggggatacatccatgttgaaaccaacactgatggcagcagttccggaaatcatggatcggatctacaaaaatgtcatgaataaagtcagtgaaatgagtagttttcaacgtaatctgtttattctggcctataattacaaaatggaacagatttcaaaaggacgtaatactccactgtgcgacagctttgttttccggaaagttcgaagcttgctagggggaaatattcgtctcctgttgtgtggtggcgctccactttctgcaaccacgcagcgattcatgaacatctgtttctgctgtcctgttggtcagggatacgggctcactgaatctgctggggctggaacaatttccgaagtgtgggactacaatactggcagagtgggagcaccattagtttgctgtgaaatcaaattaaaaaactgggaggaaggtggatactttaatactgataagccacaccccaggggtgaaattcttattgggggccaaagtgtgacaatggggtactacaaaaatgaagcaaaaacaaaagctgatttctttgaagatgaaaatggacaaaggtggctctgtactggggatattggagagtttgaacccgatggatgcttaaagattattgatcgtaaaaaggaccttgtaaaactacaggcaggggaatatgtttctcttgggaaagtagaggcagctttgaagaatcttccactagtagataacatttgtgcatatgcaaacagttatcattcttatgtcattggatttgttgtgccaaatcaaaaggaactaactgaactagctcgaaagaaaggacttaaagggacttgggaggagctgtgtaacagttgtgaaatggaaaatgaggtacttaaagtgctttccgaagctgctatttcagcaagtctggaaaagtttgaaattccagtaaaaattcgtttgagtcctgaaccgtggacccctgaaactggtctggtgacagatgccttcaagctgaaacgcaaagagcttaaaacacattaccaggcggacattgagcgaatgtatggaagaaaataattattctcttctggcatcagtttgctacagtgagctcagatcaaataggaaaatacttgaaatgcatgtctcaagctgcaaggcaaactccattcctcatattaaactattacttctcatgacgtcaccatttttaactgacaggattagtaaaacattaagacagcaaacttgtgtctgtctcttctttcattttccccgccaccaacttactttaccacctatgactgtacttgtcagtatgagaatttttctgaatcatattggggaagcagtgattttaaaacctcaagtttttaaacatgatttatatgttctgtataatgttcagtttgtaactttttaaaagtttggatgtatagagggataaataggaaatataagaattggttatttgggggcttttttacttactgtatttaaaaatacaagggtattgatatgaaattatgtaaatttcaaatgcttatgaatcaaatcattgttgaacaaaagatttgttgctgtgtaattattgtcttgtatgcatttgagagaaataaatatacccatacttatgttttaagaagttgagatcttgtgaatatatgcctgtcagtgtcttctttatatatttattttttattagaaaaaatgaagtttggttggtgatgcatgaaacaaaatagcaagagagggttatagtttaatagtaagggagataacacagcatgtgtagcaccagttgataattggtctctagtagcttactgtcaaaatgttcaatgaagtcttctgttcatctgttgaaactaggaaaatacccaaacttaaatggaagaattctgaaagagaggatagaatttaaagaacaagagtatataaagttattctttgaatatttcgttgactatatgtacattgagttatctatatttgtaaacaaattagtcatggaaaattattctatctcaaagtctccttttagtctagataatcattatttcattttaaaattagtgtttttcctagtttgcactgatgcgtgtatggatgtgtgtgagtcagtggtagcttatttaaaaagcaccttatcctttctcccataacctttgtacactaaaaaatgaaagaatttagaatgtatttgatgatagcattctcactaagacacatgagaatttaactttataaccgcgtgagttaagatttaattcataggttttgatgtcattgttgaagttatttgtaattcagaaaccttgcttgtgtgatacatagtctcttcatttattactgcttgtctgttgttatatctggattatcaaaagcaatagtgcaccaattaagatgtgctcaaatcaggacttaaatcataggcaccacatttttcatgtcagactagttactttgttgattctcagttactgtaggcatcaaaaggcaaaaatcaaaaaaaaaaaaaacaaaaacaaaaaaaaagatgaacctaggtctgtgtaaagtaaggggagtgttaggagcagccaggactgtgtagtgtgtgtttggttgcatcacaaacatcgtatgtggagacattgcaatacagtgttttttgttttcaacttttcttgtattgtatatttgtattatgttttgaatgcttttctcttttcataattaaatattaatgtttgggataactgccaagaagaagtaaaaatattgaatggaacttctatatgaggatgctgtgatctaaaaattaaatctcagtgggcggagagaatttgtttctgatgccttgtctttagaataattgtttgctttcagatgattaaaaaaaggagattgtatctaggaaaaaagtgtgaatgcttcaaaggagagatactgataattgtgacttgaaatagtgtcagatgaattatgtagctgatcactgatggaaccatctaatgaggcaggcttaaactctatttagtttcgtttgttttctcatatgaagtttataattcctttcagtcctaaaatgtcagatgccaggtgtcaaatgccacagtagaaagtgaaattaagtagagtccccttttaaacaaatttgtctgtaagcaaaactatctttagtgacttaaaaaataatatcctctaaaattaccctttcaagaggaaaaaactgttcaatgaaaaaaccactcaattatgactcatataagaaatactggtttaaccaggagatatttggggagcaaaattttaaggaatttcaaattgctaaatctaatacaaatatctgacaataagatacagatctaaaagaatggttcttaagaactattgtttactgggaataaactaagctctatgaagaattcgtaagcattacatgttccagtaagtttagcaacttagagccaagactggtggccacctccatttatttccccactgctcctccactgacatccttcttagcagaaacttcatgaaaaagtttttgctgacacagaacaaacctgaaagtagtatctactttctaaatactactttgcttttcagtagtggatttgatatttataatgttctctaaagcttgcaactttttcagcaacgtttaaaaatagattaacctggaataacttacttgtttgctgctaaaatactcaagattttgccatttttaaacaaccagtccctgtgatacaactttgaaaaaacttttaaaaatctctgatgtgtgggctctttttttcccataagaattatgtacatctgtgatgttttacagggggatccgcttttaaacagtgtacatattggaccacactgaaatgtcatatatcctttctctacttaaaattggttatttactgtgagttcatttccgatgtgttcttggttgttgctgttttctgcctgaagacgtgtatcataaagagctacatggtatggactatttatttgtaatttgacataaagtttgaagaataaagatctataaaagttgaagtttctgatattaaa

SEQ ID NO: 404 - DNA, 3014 bp, Homo sapiens
aacgcttcgctttcgtttcccgctggcgcctggctccctccgggtttcgtttcccgccggcgcctggctcccgccaggtttcgtttccgaggcggggccgagggcggcgtcgctgaggcgcccatggccttcgcccgccggctcctgcgcgggccactgtcggggccgctgctcgggcggcgcggggtctgcgctggggccatggctccgccgcgccgcttcgtcctggagcttcccgactgcaccctggctcacttcgccctaggcgccgacgcccccggcgacgcagacgcccccgacccccgcctggcggcgctgctggggcccccggagcgcagctactcgctgtgcgtgcccgtgaccccggacgccggctgcggggcccgggtccgggcggcgcggctgcaccagcgcctgctgcaccagctgcgccgcggccccttccagcggtgccagctgctcaggctgctctgctactgcccgggcggccaggccggcggcgcacagcaaggcttcctgctgcgcgaccccctggatgaccctgacacccggcaagcgctgctcgagctgctgggcgcctgtcaggaggcaccacgcccgcacttgggcgagttcgaggccgacccgcgcggccagctgtggcagcgcctctgggaggtgcaagacggcaggcggctgcaggtgggctgcgcacaggtcgtgcccgtcccggagcccccgctgcacccggtggtgccagacttgcccagttccgtggtcttcccggaccgggaagccgcccgggccgttttggaggagtgtacctcctttattcctgaagcccgggcagtgcttgacctggtcgaccagtgcccaaaacagatccagaaaggaaagttccaggttgttgccatcgaaggactggatgccacgggtaaaaccacggtgacccagtcagtggcagattcacttaaggctgtcctcttaaagtcaccaccctcttgcattggccagtggaggaagatctttgatgatgaaccaactatcattagaagagctttttactctttgggcaattatattgtggcctccgaaatagctaaagaatctgccaaatctcctgtgattgtagacaggtactggcacagcacggccacctatgccatagccactgaggtgagtgggggtctccagcacctgcccccagcccatcaccctgtgtaccagtggccagaggacctgctcaaacctgaccttatcctgctgctcactgtgagtcctgaggagaggttgcagaggctgcagggccggggcatggagaagaccagggaagaagcagaacttgaggccaacagtgtgtttcgtcaaaaggtagaaatgtcctaccagcggatggagaatcctggctgccatgtggttgatgccagcccctccagagaaaaggtcctgcagacggtattaagcctaatccagaatagttttagtgaaccgtagttactctggccaggtgccacgtctaactagattagatgttgtttgaaacatctacatccaccatttgttatgcagtgttcccaaatttctgttctacaagcatgttgtgtggcagaaaactggagaccaggcatcttaattttacttcagccatcgtaccctcttctgactgatggacccgtcatcacaaaggtccctctcatcatgttccagtgagaggccagcgattgctttcttcctggcatagtaaacattttcttggaacatatgtttcacttaatcactaccaaatatctggaagacctgtcttactcagacagcaccaggtgtacagaagcagcagacaagatcttccagatcagcagggagaccccggagcctctgcttctcctacactggcatgctgatgagatcgtgacatgcccacattggcttcttccacatctggttgcactcgtcatgatgggctcgctgcatctccctcagtcccaaattctagagccaagtgttcctgcagaggctgtctatgtgtcctggctgcccaaggacactcctgcagagccatttttgggtaaggaacacttacaaagaaggcattgatcttgtgtctgaggctcagagcccttttgataggcttctgagtcatatataaagacattcaagccaagatgctccaactgcaaatataccaaccttctctgaattatattttgcttatttatatttcttttctttttttctaaagtatggctctgaatagaatgcacattttccattgaactggatgcatttcatttagccaatccagtaatttatttatattaatctatacataatatgtttcctcagcataggagctatgattcattaattaaaagtggagtcaaaacgctaaatgcaatgtttgttgtgtattttcattacacaaacttaatttgtcttgttaaataagtacagtggatcttggagtgggatttcttggtaaattatcttgcacttgaatgtctcatgattacatatgaaatcgctttgacatatctttagacagaaaaaagtagctgagtgagggggaaattatagagctgtgtgactttagggagtaggttgaaccaggtgattacctaaaattccttccagttcaaaggcagataaatctgtaaattattttatcctatctaccatttcttaagaagacattactccaaaataattaaatttaaggctttatcaggtctgcatatagaatcttaaattctaataaagtttcatgttaatgtcataggatttttaaaagagctataggtaatttctatataatatgtgtatattaaaatgtaattgatttcagttgaaagtattttaaagctgataaatagcattagggttctttgcaatgtggtatctagctgtattattggttttatttactttaaacattttgaaaagcttatactggcagcctagaaaaacaaacaattaatgtatctttatgtccctggcacatgaataaactttgctgtggtttactaatctatgctgtc

SEQ ID NO: 405 - DNA, 5763 bp, Homo sapiens
gcgcaaggcacctgctggcaatggcaggaggcggacgtggggggtcgtgcagtaggtactggagggagagacgtgggcacaaaggtcgcgggaggaacaggtgcccacaatggctgcatatttgcccgtggatcactgaagattcctgctctcctgctgaggtggagactgcagtgagctgagatcgcaccattgcactccagcctgggcaacgagtgcaaaactcagtctccagataaaaaaaagaaaaagaaaaaaaagaggccgggtgtggtggcttatgcctatgatcctagcactttgggaggtcggggtggacggatcacgagatcaggagttggaggccagcctggccaacatagtgaaagcccgtctctagtaaaaatacaaaatttagtcagacatggtgggcaggagagagcatgtgcaggggaacatccatttataaaaccatcagacctcatgagacttattcactaccatgagaacagcatgggggaaactgcctccatgattcagttatctccacctggccccacccttgacacatgggaattgttacaattcaagatgagatttgggtgcggacagagccaaaccatataattcttccccggcccctcccaaatctcatgtcctcatatttcaaaagcaatcatgccttcccctaagtcccccaaactcttatttcagcattaactcaaaattccatagtccaaagtctcatctgagacaaggcaagtcccttccacctatgagcctgtaaaatcaaaagcaagttagttattttctagatacacagggatacaggcattgggtaaatacactcgtttcaaatgggagaaattggccaaagcgaaagagctacaggccccatgcaagtccaaaacccagcaggcaaatcttaaagctccaaaatgacctcctttgactccatgtgtcacatctaggtgatgcaagaagtgggttcccagggtcttgggcagccccgcccctgtggctttgcagggtacagccccccttctggctgcattgagtgtctgcagcttttccaggcacacagtgcaagctgtcagtggatctaccattctggggtctggaggatggtggcccttttctcacagctctgcttggcagtaccccagtggggactctgtgtgggagctccaaccccatatttccctttgacactgtcctagcagaggttatccatgagggcccccccctcccctcccccccacagcaaacttttgcctggatttccaggcattttcatacatcttctgaaatgtaggcggaggttcatgaacgttaattcttgactttggtgcatctgcaggcttaacaccacctagaacctgaaaggcttggaacttgcaccctctgaagccatggcctgaggtgtaccttggccccttttacctatggcaggagcagctgggatgcagggccccaagttcctaggctgcacacagcagggggttctggacccacaaaaccatttttccttctaagcctcctggcctgtgatgggagggtctgctgtgagggtctctaacatgccctggagacatttgccccattgtcttggtgattaacatttggctcctcattacttatgcaaatttctacaacccagtctcctgagaaaatagatttttcttttctgttgcatcatcaggctacaaattttctgaacttttatgctctgcttcttctcgaatgctttgctgcttagaaatttcttctgtcagataccttcaatcatctctctcaagttcaaagttccacagatctgtagggaactctagaaagaaattcttattttccctctttcccgcctatcttatgcccgtttctaatacaggtgcacaatgcctgcagtgtctttgcatagtaagagtgactttactccatttcccaacaaattcctcatctccctctgagaccacctccgcctggaccttgttgtccatatcactattaacattttggtcaaagccattcaacaagtctctaggaagttccaaactttcccacattttcctatcctcttctgagccttccaaactgttccagcctctccctgttacccatttccaaagttgcttccacattttcgggtatctttacagcagcaccccactctactggtatcaacttattgtattagtctgttctcacaccgcaaataaagacatacctgagactgggtaatttataaaggaaagaggttgaattgactcacagttctgcatggctggggaggcctcacaatcatggtggaaggcaaggaggtgcaaaagcatgtctcacatagtggcaggcaggagagagcatgtgcaggggagctcccatttataaaaccatcagatctcatgagacttagtcactaccgcgagaacagtatggggggaaccatccccatgattcagttatctgcacccggccccacccttgacacgtgggaattattacaatgcaagggctggtgaattaccagatctccgtcaagtgcagtaaccagttcaagttggaagtgtgtcttttgaatgcagaaaacaaagtcgtggacaaccaggctgggacccagggccagctgaaggtgctgggtgccaacctctggtggccgtacctgatgcacgaacaccccgcctacctgtactcgtgggaggatggtgattgctcacaccaaagccttggacccctcccagcctgtgacctttgtgaccaactccacctacgcagcagacaagggggctctgtatgtggatgtgatccgtgtgaacagctactactcttggtatcgcaactacgggcacctggagttgattcagctgcagctggccgcccagtttgagaattggtgtaagacatcacaatcccattattcagagcgcgtatggagtggaaacgcttgtagggtttcaccaggatccacctctgatgttcagtgaagaggaccggaaaagtctgctagagcagtaccatctgggtctggatcaaaaacgcagaaaatacgtggttggagagctcatctggaattttgccgatttcatgactaaccagtccaaggatgaaggaaaaactggacctcattatggatttacttttgggatacactcattattccagaggagggtaaaaggctgagaagcttaagacttgctataattctgtgagagagctataaaagtctgctcagaaacattataacgtaaaatggacagagaaggacaatgagatatttaatttgccacggcaaagccattgctgtgaagaatggataatatatgtcaatggtaatatatgaagaaataacacagatggagctggcttgaaatcctcttgtttatggcagtacatatcgtttatgattcaaaaaatatagcccatttccaaaaacctgcaacaaagagatactttctcaggtgtcagtttcttggtcgggaatgaaaatagtgccaacctgtgataccttcactctaattttactttctgaggaagttttctgtaatagttatttggtgataattattaatactggtgagaaaatcaatgtaaaagaggagaaataacccacacaaccacatacaactaggaaatgatagatggatctgaaaaaaaaggatatgcactcttaacaagttcaacacccaagtactattgcaagtaccagctgtatttcatggaaaaaaaaaaaagaataactcaaaaggcagaacgaagagcctagaggtcagagatgagaggcatgaataattattcacaggcgttgaatataatcaaatgacttgcaacatttaccactgggattttaaaatgtggtggaccaatcattcttttagtctgtgcattttcccatttttttcaacaggaatgtctagagacattattcctgttttgccactgtatttttggtgaatgtgtagtaagtaactggcctctttagtatcacaaagctggatgaagaaaatgtggtacatatacaccatgaaatactatgccgccacaaaaaggaaatgagatcatgtcctctgcagggacatggatgaagctggaagccattatccttagcaaagtaacgcaggaacagaaaaccaaacaccacatgttgtctcttagaagtgggagctgaacgatgggctttgcagagattaaagcttcagaaaaaaatatgggaaaatatgttaaaatgttgacctgaaaatgaagtggatgactataaaactcttgagagaattagactttttgtagcagtttattacatgataataccttaaaggagatcacattcagtgacctgcgttgacagatgtgaatttcttcggagtaagaaatcctcagaggaaattacccagtatattcaaagctacaagggatttgttgacataacggtaatgtataacagcaatttttttctcaagtttttggattacctgtaagtgtctgactcagaagggcataggcattctttttatgtcatgggtttgatttctttcttcctttctcctttcattcccctggctcccatcttcaaagtgaaaaatatcacattcacttgctgacctagagcctttttctttttccagggctggcttctgacgggctctgcttgccttcctgatagtcttcccctttatgaatgaagccacttgccccagcttccctctgctgcccctatctgcaggcttgctaagatctcctgacctaggcgctgtcacccacagtgggctgcagagctggctcttcctagctggctaactatcctgaatcagtaaaaatttcctagtggagagtgatgggaaatcgaatccaaactggcttaaacaaaaatgagaatttattgattaacatgactcaggagaccagaactctatagagaacatggcctgacagtgggggaagagaggtgtttcctcaaaaagaaactgggtgcagctttcccagaagaatcagttgctcaatatataataccctgatgaatttagttaccattctatgtctcttacttcctcattcgtcaaagtacatctgtgatatttaaatgcaggtctgttttcaaggtcagtttccggaaacagtgaccctgagaaggcttcctcctgagtatgcataaacattcacagcttgcatgcgtgtgtgtgtgtgtgtgtgtgtgtgtgtgtatgtttgcttgcactgcataaaaacaattgcaacatcaacagaaataaaaattaaaggaataattctcctccgactctgccgttccatccagtgaaactcttcattctggggtaaagttccttcagttcttgttcatagataggtatatacttcataagtcaaacaatcaggctgggcgcagtagctcatgcctgtaatcccagccctttgggaggccgagctgggcagatcacttgagatcaggtgttcgagaccagcctcaagacctccaacatgggccgggtgcagtggctcacgtctgtaatcccagcactttgggaggccgagacggacggatgatgaggtcaggagatagagaccatcctggctaacatggtgaaaccccatctctactaaaaatacaaaaaaaaaaaaaaattagcccggcatggtggcaggcgcctgtggtcccagctactcgggaggctgaggcaggagaatggcgtgaacctgggaggcagagcttgtagtgagccaagtgccactgtgctccagcctggacgacagagcgagactctgtctcaaaaaaaaaaaaaaagaaaaaaaaaaaaaaaa

SEQ ID NO: 406 - DNA, 164 bp, Homo sapiens
atacttacctggcaggggagataccatgatcacgaaggtggttttcccagggcgaggcttatccattgcactccggatgtgctgacccctgcgatttccccaaatgtgggaaactcgactgcataatttgtggtagtgggggactgcgttcgcgctttcccctg

SEQ ID NO: 407 - DNA, 2973 bp, Homo sapiens
agcagtggccggaggaggcgagcaggggctcgggcagctgcttgaacaagttccgcagggtgctgagctcgcgcgacagctgctccaccttcttctgcagccgctcgttctcggccgtgagctccaggaccttgtgctgcgtctccaggttgcgcatcttggccttgtcgcggctcttgcgcacggcgatgttgttgcgctcgcgccggatcttgtactcgtcgctgtgcttgtccacggtcttcttggccttgctcttgacctgcgagggcgccggcgcggcccccgcgtagcaggcggtcgggggcgccttggcgtcagcggggctcggcgtgccgggcgggctggacgaggaggacgtggagaggctcccgctgctgccgctcggcaccgcctggtagccgagttcttgcccccgtagtcgtcggagaagaggtcggagaggaagtcgtggtgctgcccggaggaggcgggcgcgggggcgggcgcgggcggagccgcctcgaaggtgtccgtggccgtggcgggcgccggggcctgcggcgcgcccagcggctccaggtccccggctttagaaagaagacttgacgcctgtgacgactcccctcttaagccacagacaatatgaggaccccgggggtcggcgcgaccgggcaggatcgcgccccgcttggggctggaccctggtccacggagccccgcccctagccccgcccaccacacctgccgcctgctcgaggcttggacacgcccgggtcttctcttgccccgcgctgcgccacccgacctgggccctgggatggggcaggggcggggggtgctcggccctgccacactgtgtgaccttgggaagatgcttttgctgctgccatttcacagacgggaaagcgacaacggcccgcctggacttgaacacaggcccaaggccttctgaccacttgcccgcctctgctggtcttgctgtctgtccccacggccttcactactgtgtccctggtgcctagaacagagcctggtacatagaaggtgctcgatgaatgcttttccctatcccattttcaagaggagaaaactgaggcgatttgccaaggggagatccacgtggctgctttgacagagagtgttctgcaaaagggcttagaaatcagccagcaggtggcaggttctgggactgcaggagccattcacatgcgtgaagatccgctgggcgcccttgctctgggatcaggaaaggccggtgccatggatgtgatagatgcacacagggcatcagcaggccgccgagaggaaccagagtgtccaacgaacagaaaacagtgctcaaccttcacatttatcgaatgttccttggcacatgctgtaattctggccctaaagacacattcatggacaagacaagcaattcctgttctcgtggagctgaaattctcctgggggaagacaagcactaaacaagatcaatgattaaagtatagattgtattagattctggtcagcactatggaggaaaatacagcaggggagcagagcaggagttctgggagatttgattttttgttttctggggttttttgtttgtttgttttttgagacagggtctcactgctggagtgcagtggcacgatctctgctcactgcagcctctgcttcttgggctcaggtgatcctcccacctcaacctcccaagtagctgggaccacaggggcatgccaccacacccagctgattttttaatgttttgtagagatcaggtctcattatattgcccaagctgggggagttgattttaactttatgttagagtagtcagggaagacctcactgaggtgacatttaagcaaaaacctgaatgtggtgaagcaggtatctgggggaccttggaccacacaaagggaacagcaagtgcaaaggccctgaggtaggagcacgtagttgtggtgatgacggagagtagcaggaatttgtgtcatagaaatagtgggggctggccaggcacagcggctcatgcctgcaatcctagcactttgggaggccgaggtgggtggattacttgaggtcaggagtctgagaccagcctggccaacatggtgaaaccccatctctactaaaaattaaaaaaaaaaaaatggccaggcatggtggcgtgcatctgtaatcccagctattcaggaggctgagacatgagaatcacttgaacccgggaggcggaggttgcagtgagccgaaattgtgcctctgcactccaacctgggtgacaaagcaagactctgcctccaaaaaaaaaaaaatggaacatggaaacatggaatgggagaaaatatttgcaaatcatatatctgataaggggttcatatccagaatacataaagaactgttacaactcaacagcaataaaaacaactcaattaaaaatgggcaaaggacttgaataaacatttctccagagaaaactgtgaatggctaataatcacatgataagatactcaacatcactaaccattaaggaaatacaaaccaaaactgcaatgaggcgcaacactttggtggatcacctgaggtcaagagttggagaccagcctggccgacacggtgaaaccccgtctctactaaaaatacaaaaattagctgggcgtgatggtacgtgcgtatagtcccagctacttgggaggctgaggcaggagaatcacttgaacctgggaggtggaggttgcagcaagccaagatcacgccactgcaccccagcctgggcaactgagtgagactccatctaaaaaacaaacaaaacgcaatgagaagagaggattttgaatgttcccgacacaaagaaatgataaacgcttgaggtaatggatatcctaattacccagatttgattattacacgttgtatacatgtattgaaatatcattttgtaacccatgaacatgtacaattatgtgtcaactaaaaataaaaggaataaaacacaatgag

SEQ ID NO: 408 - DNA, 974 bp, Homo sapiens
agagcgcaccccgagcgccggcgagcggcgcggtgagaccctcgtgcaggtgagcccggcgcacggcggcccagaatcctggaccccaggagaagcgtctacggccccgacagagacggagtttcaccatgttggccaggatggtcttcaacttctaacttcgtgatccacgctgctgggattacaggtgtgagccaccgcgtgtggcctctgggcaccttttgaaggtggtttcaccccaacatcagcagggtggaggcggagaagctgttcctatccagaggtcagcgtggggacttccttgccaggcccagtgagagcagcccggggggcttcacgctgtccgtcaggtagctgaagcagagagagaaggcggcaggcatcagcgttttcttctatgaacttataagatcaaagactttaagactttcactatttcttctaccgctatctactacgaacttcaaagaggaaccaggagtacggaaggagcatgaaagtggacaaggaacgtgaccattgaagcaccacagggaggggttcaggcctccggatgactgcaggcaggcctgggtaacatccagcctcccacaagaagctggtggagcagagcgttccctgactcctccaaggaaaggagactccctttcccggtctgctcagtaacgggtgccttcccagacactggcgttaccgcttgaccaaggggccctcaagcggcccttatgcgggcatgacagaaggctcccctcttgccttctattcacttctcacaatgtcccttcagcacctgaccctatacctgccggttattcctaggttatattattaatgcaacagagtaatattaaaagctaatgattaataatgtttataataatgatggataattgttcatgatcatcgctgtatctaatttgtattatgactattcttattctattttctttattatactgaaacagtttgtgcct

SEQ ID NO: 409 - DNA, 574 bp, Homo sapiens
gtgattgccacatctcggattcgccgcggggcaactacctgggaaaaccgcagactgggcaatgaaagactacatccggcaaccggatgctgggttctgtgactccaggaaaaggggctcctgggcccagggagaacatactaggcgatctcgacagtcgctccgtgacagcccaccaacccccaaccctctacctcgcagccaccctaaaggcgacttcaagaagatggaaggatctcacggatctcattcctaatggtccgccgaagtctcacacagtagacagacggagttgagatgctggaggatgcagtcacctcctaaacttacgacccaccaccagacttcatcccagccgggacgtcctcccccacccgagtcctccccatttcttctcctactttgccgcagttccaggtgtcctgcttccaccagtcccacaaagctcaataaataccaagagacctgcatttacagcagggggaacatctcacacccttgcataagttaaaataaatattacgtacacatctccatcacctaggaggacgtacataaatacatataaatatta

SEQ ID NO: 410 - DNA, 378 bp, Homo sapiens
atggacatgagggtccccgctcagctcctggggctcctgctgctctggttcccaggtgccagatgtaacatccagatgacccagtctccatctgccatgtctgcatctgtaggagacagagtcaccatcacttgtcgggcgaggcagggcattagcaattatttagcctggtttcagcagaaaccagggaaagtccctaagcacctgatctatgctgcatccagtttgcaaagtggggtcccatcaaggttcagcggcagtggatctgggacagaattcactctcacaatcagcagcctgcagcctgaagattttgcaacttattactgtctacagcataatagttaccctcccacagtgttacacacccgaacataa

SEQ ID NO: 411 - DNA, 1517 bp, Homo sapiens
atgacccagagggctggggctgccatgctgccttcagctctgctccttctctgtgtcccagatgagcagggcaggtcctgggtgcagggaggtctgctctggcgggtcaggagtgggtggaggaatgagagaggggactcgaagagggagagtaatgtcgaaatattggagggggcagaggacctggagaagaggcccaggacatgccaaggcgggtgggtgctgcagagaattgggggtgggaaggaagctctgatgggtgtccctgtggagcggagccctgcagatgttaggcaatggcgagtgttgctgcaggattctgtcccgggggaaaattccaggccctcaggcaacactgggcgtgcagaggacctgacactcaaggttccactggtccagactcttccaggtgaagacggggaaacggacttgtgttttccaggctgtctgactgtgagtggccccagcaccgtgatgggcgccgtgggggaatccctgagtgttcagtgtcggtatgaagagaaatacaagacgtttaacaaatactggtgcagacaaccatgcttgccaatttggcatgaaatggtggagaccggagggtctgagggagtggtgaggagtgaccaagtgatcatcacggaccatcctggagacctcaccttcaccgtgaccttggagaacctcacggcagacgatgcaggaaaataccgatgtgggattgcaacaatactgcaggaagatggcctgtctggtttcctgcccgatcccttcttccaggttcaagtgctggtctcatcggcctccagtactgagaactctgtgaagacacctgcatctcccaccaggcccagccaatgccaagggtccctgcccagcagcacctgcttcctgcttctcccactcctgaaggtgcctctgctcctgagcatactcggtgctatcctctgggtgaacaggccttggaggactccttggacagagtcatgaacaggagaacttgcaacaccccatgcccattggaaccctgtccagagacacagcccctctgactgcaaaaaggacttctgaccctgaccctcatatttctttccatcttatcaccggatactttttaaaagttaaaaaaaaatgtaggccgggtgcggtggcttacacctgcaatcccagcactttgggaggccaaggcaggtggatcacttgagtccaggagtttgagagcagcctgggcagcatggtcagacctcatctctacaaaaaaatacaaaaattagcagggtgtggtggtgtatgcctgtgatcccagctacttgggaagctgagacaggaggatcgcttgagccccggaggtggaggttgcattgagtcgagattgtgccactgcactccagcctgggtgacagagggagaccctgtctcagataaacaaataaataaataaaatacatcccatacacaagagtatgtatatgaggtatctatacagttcaaggactaaaaataaacatgtgtacccacca

SEQ ID NO: 412 - DNA, 906 bp, Homo sapiens
caggtggcatttgatggcttcattctgtgtaaggaaggagaagatgaacacccacaatgcctgaactcccattcccatgcccgtgggtcatcccgggccatcttctccgtgggccccgtgagcccaagtcgcaggtggtcgtacaggtgctatggttatgactcgcgcgctccctatgtgtggtctctacccagtgatctcctggggctcctggtcccaggtgtttctaagaagccatcactctcagtgcagccgggtcctgtcgtggcccctggggagaagctgaccttccagtgtggctctgatgccggctacgacagatttgttctgtacaaggagtggggacgtgacttcctccagcgccctggccggcagccccaggctgggctctcccaggccaacttcaccctgggccctgtgagccgctcctacgggggccagtacacatgctccggtgcatacaacctctcctccgagtggtcggcccccagcgaccccctggacatcctgatcacaggacagatccgtgccagacccttcctctccgtgcggccgggccccacagtggcctcaggagagaacgtgaccctgctgtgtcagtcacagggagggatgcacactttccttttgaccaaggagggggcagctgattccccgctgcgtctaaaatcaaagcgccaatctcataagtaccaggctgaattccccatgagtcctgtgacctcggcccacgcggggacctacaggtgctacggctcactcagctccaacccctacctgctgactcaccccagtgaccccctggagctcgtggtctcaggtgagggccctgaccctgtcctctctgagctcaaaggctcagctcaggccctgcccccagcagagctctgggacaataatgaatga

SEQ ID NO: 413 - DNA, 2278 bp, Homo sapiens
attcttctcagcaccacactgcactttttctaacactgaccacataattggaagtaaaacactcctcagcatacacaaaagaatggaaatcataacaacctgtctctcagaccacagtgcaatcaaattagaactcaggattaagaaactcactcaaaaccacacaactacatggaaactgaacaacctgctcctgaatgactggtaaaaaatgaaatgaaggcagaaataaagatgttctttgaaaccaatgagaacaaagacacaacgtaccagaatctctgggacacacttaaagcagtgtgtagagggaaatttacagcactaaatgcccacaagagaaagcaggaaagttctaaaatcgacatcctaacatcacagttaaaagaactagagaagcaagagcaaacaaactcaaaagctagcagaaggcaagaaataactaagatcaaagcagaactgaaggagacagagacaccagaaactgttcaaaaaatcaaatcaatgaatccaggagctggttttttgaaaagatcaacaaaacagactgctagccagactaataaagaaggaaagagagaagaatcaaatagaggcaataaaaaatgataaagggaatatcaccagtgatcccccggaaatacaaaataccatcagataatactataaacacctctacgcaaataaactagaaaatctagaagaaatggataaattcctggacacatacaccctcccaagactaaaccaggaagaaatcaaatccctgaatagaccaataacaagttctgaaattgaggcagtaattaatagcctaccaaccaaaaaaagcccaggaccagatggattcacagccgaattctaccagaggtacaaagaggagctggtaccattccttctgaaactattccaatcaatagaaaaagagggaatcctcccgaactcattttatgaggccagcatcatcctgataccaaagccgggcagagacacaaccaaaaaaaatttgaggccaatatccctgatgaacatcgatgcaaaaatcctcaataaaatactggaaaaccgaatccagcagcatatcaaaaagcttatctaccatgatcaagtgggcttcatccctgggatgcaaggctggttcaacatatgcaattcaataaatgtaatccatcacataaacagaaccaaagacaaaaaccacatgattatctcaatagatgcagaaaaggactttgacaaaattcaacagcccttcatgttaaaaactctcaataaaccaggtattgatggaacatatctcaaaatagtaagagctattatgacaaacccacagtcaatatcatactgaatgggcaaaaactggaagcattccatttgaaaaccggcacaagagaaggatgccctctctcaccccatcaaaaagtgggtgaaggatatgaacagacacttctcaaaagacatttatgcagccaacaaacatatgaaaaaatgctcatcctcactggtcattagagaaatgcaaatcaaaaccacaatgagataccatctcacaccagttagaatggcgatcattaaaaagtcagggaacaacagatgctggagaggatggggagaaataggaatgcttttacactgttggtgggagtgtaaattagttcaaccattgtggaagatggtgtggcgattccttaaggatgtagaaccagaaataccatttgacccagcaatcccattcctgggtatatacccaaaggattataaatcattgtactataaagacgcatgcacacgtatgtttattgtggcattgttcacaatagcaaagacctggaaccaacccaaatgcccatcaatgattgatagactggattaagaaaacgtggcacatatacaccatggaatactatgcagccataaaaaaggatgagttcatgtcctttgcagggacatggatgaagctggaaaccatcatcctcagcaaactaacacaagaacagaaaaccaaacactgcatgttctcacccataagtgggagttgaacaatgagaacccatgaacacagggaggggaacatcacacactggggcctgttggcgggtcaggggctaggggagggatagcattaggaggaatacctaatgtagatgatgggttgatgggtgcagcaaaccaccacggcacatgtatacctgcacattctgcacatgtaccccagaacttaaagtataataaaaacacaacaatgaaatacagcatacaaataaacaaaaatgtttgc

SEQ ID NO: 414 - DNA, 513 bp, Homo sapiens
atgaaccacccagctcctgtgaaagtcacatacaagaacatgagatttcctattacacacaatccaaccaatgtgaccttaaataaatttatagaggagcttaagaagtatggagctaccacaatagtaagagtatgtgaagcaacttatgacactactcttgtggagaaagaaggtatccatgttctcaattggccttttggtgatggtgcaccaccatccaaccagattgttgctgattggttacattttgtaaaaattaagttttgtgaagaacctggttgttatattgctgttaattgcattgtaggccttgggaaagctccagtacttgttgccctagcatcagttgaaggtggaatgaaacatgaagatgcagtacaattcataggacaaaagcggagtggagcttttaaaagcaagcaacttttgtatttggagaagtatcatcctaaaatgcggctgcgcttcaaagattccaatagtcatataaacaactgttgcattcaataa

SEQ ID NO: 415 - DNA, 549 bp, Homo sapiens
gaaggcagggtgggctcccgcacgggaggagggccccgctcaggccattggctgtctcctcgctgaaggtggacggcagatgccccaggcctagcctttaaccctaaccgagatgctcagagcagctttaaaggtcagcctctccctggcccaggatggtactcggctcaccatacgtcaggcacgtcagcaagagcagcggcagcaggaaccagaggaacgtcttcagggacgagaagcgcctggaccacgcgggagggcaggacgggggaggcggaggtgtgaggggagctccaggcctccacgttccacccagggagtaccctgagatgttttcctgggtgctgaactagagctaaggaggatagcttgagcttctcactgtgccagggccagcctggacacgtcagagcctttcctgctgggcaggtcttagagtgatgggacaattttgactgaattttactgatgttattaaaaatagtgtggtctttgaaaaactcaaaaatttttatatggacaggtcctctaagtatgcaaatatagaaa

SEQ ID NO: 416 - DNA, 240 bp, Homo sapiens
atggggaagtcctgggtgtggggacacagtcgggttgacccagggctgtctccctccagagcctccctccggacaatgagtcccccctcttgtctcccaccctgagattgggcatggggtgcggtgtggggggcatgtgctgcctgttgttatgggttttttttgcggggggggttgcttttttctggggtctttgagctccaaaaaataaacacttcctttgagggagagcacacctga

SEQ ID NO: 417 - DNA, 1446 bp, Homo sapiens
ctcctggcctcaagcaatcctcctgccttggcctcccatagtgttgggattataggcatgagccactgcgcctggctatgcaggcatttttcaaaggcccctcacctctccgtctcctcccagtaaggagtagtgagtgtgcccagccagcagccagcaatcaagtagcccatggtggccaggaggctccggggagtcccaagtccacccaggagtgctttaggccactgatgtgagtgggaccccccccccactccacccctttttatttattgtaatgtggcgacattacttttataatgtaagtgcttatgatcttctgacatctctgtgtctgaccattatatagaggggatatttagcaatgttgggagacatttctggttgtcacagtggccggtatctagtgggtagagaccagagagctcccaaacatctcacaatgcccagggcagctccctcccctgccacgcacacataacaaagaagtatctggccccacatggcaacagtgctaaggctaagaaaccctggtctataagagagcgccacaaatcagactgtcagcacaggagggaatccatgcactggagactggcgtccagagaggggcagtgatttgcctaaggacatacaggaagctatgatacaaatcactgctcagattcatgggtcccacctggcgagttaatgtttttcttcttcctttttaaaaaatctaacagtaatttttagtaacttgtaaatcagttttgtgagtgaattctcttttaacgtcaacccagcataaggaggggcatccaccctgagaagcaccgtggtcgcgggcacagatgcagacagaagggaagtcatggtagcttgtgaacagggagaggtttcagctgtagccagcctggtagcccttgcacaggtgggagtgtcctgttggggccctgccacctggcaggtccctctgggtctcagccagatgaaggaggaaggcttcaatatccagatttgccccaggatcctgcagctcctgaaaggcaagctggtggtgggtcatgacctgaagcacgacttccaggcactgaaagaggacatgagcggctacacaatctacgacacgtccactgacaggctgttgtggcgtgaggccaagctggaccactgcaggcgtgtctccctgcgggtgctgagtgagcgcctcctacacaagagcatccagaacagcctgcttggacacagctcggtggaagatgcgagggcaacgatggagctctatcaaatctcccagagaatccgagcccgccgagggctgccccgcctggctgtgtcagactgaagccccatccagcccgttccgcagggactagaggctttcggctttttgggacagcaactaccttgcttttggaaaatacatttttaatagtaaagtggctctatattttctctacgcca

SEQ ID NO: 418 - DNA, 2992 bp, Homo sapiens
tttgcaaagaaggaagatggttgtttccgaagtggacatcgcaaaagctgatccagctgctgcatcccaccctctattactgaatggagatgctactgtggcccagaaaaatccaggctcggtggctgagaacaacctgtgcagccagtatgaggagaaggtgcgcccctgcatcgacctcattgactccctgcgggctctaggtgtggagcaggacctggccctgccagccatcgccgtcatcggggaccagagctcgggcaagagctccgtgttggaggcactgtcaggagttgcccttcccagaggcagcgggatcgtgaccagatgcccgctggtgctgaaactgaagaaacttgtgaacgaagataagtggagaggcaaggtcagttaccaggactacgagattgagatttcggatgcttcagaggtagaaaaggaaattaataaagcccagaatgccatcgccggggaaggaatgggaatcagtcatgagctaatcaccctggagatcagctcccgagatgtcccggatctgactctaatagaccttcctggcataaccagagtggctgtgggcaatcagcctgctgacattgggtataagatcaagacactcatcaagaagtacatccagaggcaggagacaatcagcctggtggtggtccccagtaatgtggacatcgccaccacagaggctctcagcatggcccaggaggtggaccccgagggagacaggaccatcggaatcttgacgaagcctgatctggtggacaaaggaactgaagacaaggttgtggacgtggtgcggaacctcgtgttccacctgaagaagggttacatgattgtcaagtgccggggccagcaggagatccaggaccagctgagcctgtccgaagccctgcagagagagaagatcttctttgagaaccacccatatttcagggatctgctggaggaaggaaaggccacggttccctgcctggcagaaaaacttaccagcgagctcatcacacatatctgtaaatctctgcccctgttagaaaatcaaatcaaggagactcaccagagaataacagaggagctacaaaagtatggtgtcgacataccggaagacgaaaatgaaaaaatgttcttcctgatagataaagttaatgcctttaatcaggacatcactgctctcatgcaaggagaggaaactgtaggggaggaagacattcggctgtttaccagactccgacacgagttccacaaatggagtacaataattgaaaacaattttcaagaagttctggaggctggaagtccaagatcaagatgttggtggagctggttccttctaaggcctctctccttgccttgcagatggcctcttctcattgggtcctcatgtggttgtccctcagtgtgtgtgtcctcatctcctcccacaaggacactaggcagatgggatgagggcccaccctagtgacctgatttcaatttaattacctctttgcctgtctccaaacacagtcagattctgagtttctgagggttaggacttcaacattggagtttgaagaggtcacaactcaagctcagcccgtaacaccaagtcctggaatatttccagccacagacaggcacagagtgctggtccacagcaccccatggatgaaccttgaaaatgtcatgctgagtgaaagaagccagccacaaaggccacacggtctatgattccattgatagaaaatggctagaacaggcaaacccaggcaggcagaaagcagaatagtggctgccaggggctggggagggaaaagtgggaagttatcactgatgggtgatggatgtggggtttgggagttatgtctggggatggtcgcacaactttgtgaatatactaaaattcactcacccatacacttttttttttctttttctttggagacagggtctcactctgttgcccaggctggggtgcagtggctcagtctcggctcactgcaccctctgcctcccagattcaagcgattctcctgcttcagcctccacctccctagtagctgggattataggcacctgtctaatttttgtatttttagtagagatggggtttcaccatgttggccaggctggtctcgacctcctgacctcaggtgatcactggcctcagcctcccagagtgttgggattacgggcgtgagccactgtgcctggcctgaaccatatatttttaacagagtgaatgttatactatgtaaatgacatctcaattagaaaaatccttatgggaaaatatttcctgactaaaaaaagtgttctagattaccactcaaaaaggaactcaaaccctctgaacttctgatggggctaactctctctagtgtggattgttgggagtacaaatcattccaaaagtttaaagaaaaatgcagcatcttacacagtgaacagtgctactgtatcacattcatacaagttgatgtgcctggtttactctgttatcccatttgacttgtaaacactttctacacatggcaatactttcgacacatgaatatgtgatgtattgttaattccagaaagtgttcatgctcatttctaatgggcatgcagttgagggcaaggagtgtattatggtacaatttctttggtaaaactaaaattggattcacaaaacttcatactcgagtacgtttttaagaaggggtcttggccgggcacggtggctcacgcctgtaatcccagcactttgggaggccgaggcaggtggatcatgaggtcaggaaattgagaccatcctggctaacacggtgaaaccccgtctctactaaaaatacaaaaaaattagccgggcgtggtggcgggtacctgtagtcccagctacttgggaggctgaggcagaagaatggcgtgaacccgggaggcagagcttgcagtgagctgagatcacgccactgcactccagcctgggtgacagagcgagactctgtcacaaacaaacaaa

SEQ ID NO: 419 - DNA, 7707 bp, Homo sapiens
agtcaagggctgcgggtgcatgttgggcagcgacccccgggctggcaccgtctacctggcgttggttttgcagcgctcctggactgggagtttgttggacgtttctgtctgggttttgaagtgctgggagttgaggtcactgctgcagaggttggagtgacagccctggatacctccagccagctgttcctttcagataatgcacggaacttaagctgcagctgactggtgaagaggcgcccctcgggccctccgatcgggtggtcgttggcgctttgctcctttcgtgtcttttttggagccaagcgttgcatgctcatggccacgtagaccttgcagaagcgctgcggctttttcccaaattgtgcaggaccagcccgacggggcgtagggtaccgcagtggccgccagcccggcggaggtggggggcttcagtcccagagacagcttcccagacgctcacgggtccttgcagggggctggggtcctggcgcggggttcagcttttccagtagcagcagtgtaagagaagtatgcatgtagacgtgggtcgctggcccctgctccagcccctaccccacggttagactgtctttgtcagctggagtcgtcccacatcctgccacctggcctctcagaaaagcagtggcattaagtaaggaaggagcttaactctttttgagcccgctttgttttcggttctcctcgcctcagatcttcttgccttggaaagccagtctggtcaagtgtctcagggtagcattttggcagaaccattgttaattaaagggacttctggaccgcaaccttaatgtaccagattattgagcagccaatgaatgcttcattctcattgtttaaggtgctgctttgatttttttttcaattctttgtactatttttgattttttggagaggcacatccccaaatttggatgaggtatttgttgataaataattcatcaatttccacaatgcagacaaaaatgtctgcccagagtggaaaaataaaacaagggggagaagagtttgagtaacggagaagttctgtggaatcctagtgacaaaagttgagaaactacctttaaataagacagtgaggtaacaaatgttaaaaaaaaaaaagttaagggtaatattgcattgtttgccacttataacgtatctgaaacatttgttctttaatcttaagcgtagagtggtccaagacctggaaatctgggcagtgggttttgatttctaaggaggcagttttacaggctgtgcaaggctaaccctaccaatgagatcacactggcgtatccgatattgacatttgcatgtcttgcctatggtttacagctctcactattttagatctttggtgaaaaatctttagattcagaagagaaaaataaaagagtcaggcaagcaaaaagagataacacctcatttgtttaaaatcttcctactgcccatctctttccatctgattgtggcaggcactgtagccacaggtttggtgttgtgggattgcaaggggcaggtattgaaagacctggctcctaggcaaaactttgcccctgaatggctgtgggatctgagcagtacctgtaactccattgccttagctgcagactaaggtggtagtgtaatttcagggaagggaataaggtcatctttgacttttagtcccatcatcaagcatggtgattggccttcagtaggtggtcaggtagtgcttgttgggtggatgggtggatggatggatagatggatggatggatggatggatggatggatggatggatggacggacggacggacggacggatagatgatattgtgaaagagacttttgctgtgccacaaaggaaaggtatatgtgttatttttatcctgctatgattttgcccaattccacctgtagaggacgtctgacatcaaaagagagcaccatctgatccagagaatgactcccactatgcctttcccagcaatcagattaagaatcccaatctaaaactatcaccagaaaactcctcaggagaaaccatgggtcatctagtccaacctctctcctttgagtgggccacaagaattatctcaacaccttatcaatggtgttgagagtctagacccacacagaagtagctaccctaaaatctaggtttcttctcctccctcttccataggtttaacatttttattaactggaaagttgccctggcaaataagatgttgcaggaatggaattaacaatcactgtgaaatttcctagggaatgtctttgtgctctgaaaacttcttcatcttcttggaaattaggaagtgtggccagacaccctactaagggctagtaaatcacagctggctttttacagtgttccacactggagagatcctacatcatgttaatttgcatcatcctgcgctgttggcatgggttgtagatgctggtctttgccacctttcctccttcatttgccagagtggcctcctggtggaaacttctttccttgtctacttctagattttcattccttctactagttgattatgcttaaagatttcagggtgaaaagccaggcagacttgcctctgtgttggtacctggagggtgatgataaaatttcattggcagttgagttaaaatgattgagctccaatatctgttcttagaagtatagaatttattgttctattattattttgcggtttttcattttttgttttcgtagagacctaggtctcaccgtgttgcccaggctagtctcaaactcctgagcttaagtgatcctcctccctcgacctcccaaagtgccaggattaaaggcatgagccaccatgcctagcctattgttagtctgtttcttattctgatatgaagtccggtgcggaggttctgaaggaatgctgactgctcttaaaattgcaaagcatcttgctggaaatggacttttttattgattagaaaacattcggttttaactctttataaacatcagaataaacttcatgattaaacactttataaatacttctctttggggctaaagaggaaacaccaaccagcagcctaagtgacagcataaaattgcaagatttttcataaagtattttactgtccttccagcatagggagggagtgataactcaagagtttgcccaagagcaggagtgcttggtggtggtctgaggggaggagctacagacttgtcagggctactttgagcccttaactggcatccagtactccccaaatccagtgctgttcagggtggcctcagaatgaaacgggagcttaagttggttttgaggagcagtacctgttgctgacagacagggtgttggagagcacaatggctgaacaagtccttcctcaggctttgtatttgagcaatatgcggaaagctgtgaagatacgggagagaactccagaagacatttttaaacctactaatgggatcattcatcattttaaaaccatgcaccgatacacactggaaatgttcagaacttgccagttttgtcctcagtttcgggagatcatccacaaagccctcatcgacagaaacatccaggccaccctggaaagccagaagaaactcaactggtgtcgagaagtccggaagcttgtggcgctgaaaacgaacggtgacggcaattgcctcatgcatgccacttctcagtacatgtggggcgttcaggacacagacttggtactgaggaaggcgctgttcagcacgctcaaggaaacagacacacgcaactttaaattccgctggcaactggagtctctcaaatctcaggaatttgttgaaacggggctttgctatgatactcggaactggaatgatgaatgggacaatcttatcaaaatggcttccacagacacacccatggcccgaagtggacttcagtacaactcactggaagaaatacacatatttgtcctttgcaacatcctcagaaggccaatcattgtcatttcagacaaaatgctaagaagtttggaatcaggttccaatttcgcccctttgaaagtgggtggaatttacttgcctctccactggcctgcccaggaatgctacagataccccattgttctcggctatgacagccatcattttgtacccttggtgaccctgaaggacagtgggcctgaaatccgagctgttccacttgttaacagagaccggggaagatttgaagacttaaaagttcactttttgacagatcctgaaaatgagatgaaggagaagctcttaaaagagtacttaatggtgatagaaatccccgtccaaggctgggaccatggcacaactcatctcatcaatgccgcaaagttggatgaagctaacttaccaaaagaaatcaatctggtagatgattactttgaacttgttcagcatgagtacaagaaatggcaggaaaacagcgagcaggggaggagagaggggcacgcccagaatcccatggaaccttccgtgccccagctttctctcatggatgtaaaatgtgaaacgcccaactgccccttcttcatgtctgtgaacacccagcctttatgccatgagtgctcagagaggcggcaaaagaatcaaaacaaactcccaaagctgaactccaagccgggccctgaggggctccctggcatggcgctcggggcctctcggggagaagcctatgagcccttggcgtggaaccctgaggagtccactggggggcctcattcggccccaccgacagcacccagcccttttctgttcagtgagaccactgccatgaagtgcaggagccccggctgccccttcacactgaatgtgcagcacaacggattttgtgaacgttgccacaacgcccggcaacttcacgccagccacgccccagaccacacaaggcacttggatcccgggaagtgccaagcctgcctccaggatgttaccaggacatttaatgggatctgcagtacttgcttcaaaaggactacagcagaggcctcctccagcctcagcaccagcctccctccttcctgtcaccagcgttccaagtcagatccctcgcggctcgtccggagcccctccccgcattcttgccacagagctggaaacgacgcccctgctggctgcctgtctcaagctgcacggactcctggggacaggacggggacgagcaagtgcagaaaagccggctgcgtgtattttgggactccagaaaacaagggcttttgcacactgtgtttcatcgagtacagagaaaacaaacattttgctgctgcctcagggaaagtcagtcccacagcgtccaggttccagaacaccattccgtgcctggggagggaatgcggcacccttggaagcaccatgtttgaaggatactgccagaagtgtttcattgaagctcagaatcagagatttcatgaggccaaaaggacagaagagcaactgagatcgagccagcgcagagatgtgcctcgaaccacacaaagcacctcaaggcccaagtgcgcccgggcctcctgcaagaacatcctggcctgccgcagcgaggagctctgcatggagtgtcagcatcccaaccagaggatgggccctggggcccaccggggtgagcctgcccccgaagacccccccaagcagcgttgccgggcccccgcctgtgatcattttggcaatgccaagtgcaacggctactgcaacgaatgctttcagttcaagcagatgtatggctaaccggaaacaggtgggtcacctcctgcaagaagtggggcctcgagctgtcagtcatcatggtgctatcctctgaacccctcagctgccactgcaacagtgggcttaagggtgtctgagcaggagaggaaagataagctcttcgtggtgcccacgatgctcaggtttggtaacccgggagtgttcccaggtggccttagaaagcaaagcttgtaactggcaagggatgatgtcagattcagcccaaggttcctcctctcctaccaagcaggaggccaggaacttctttggacttggaaggtgtgcggggactggccgaggcccctgcaccctgcgcatcaggactgcttcatcgtcttggctgagaaagggaaaagacacacaagtcgcgtgggttggagaagccagagccattccacctcccctcccccagcatctctcagagatgtgaagccagatcctcatggcagcgaggccctctgcaagaagctcaaggaagctcagggaaaatggacgtattcagagagtgtttgtagttcatggtttttccctacctgcccggttcctttcctgaggacccggcagaaatgcagaaccatccatggactgtgattctgaggctgctgagactgaacatgttcacattgacagaaaaacaagctgctctttataatatgcaccttttaaaaaattagaatattttactgggaagacgtgtaactctttgggttattactgtctttacttctaaagaagttagcttgaactgaggagtaaaagtgtgtacatatataatatacccttacattatgtatgagggatttttttaaattatattgaaatgctgccctagaagtacaataggaaggctaaataataataacctgttttctggttgttgttggggcatgagcttgtgtatacactgcttgcataaactcaaccagctgcctttttaaagggagctctagtcctttttgtgtaattcactttatttattttattacaaacttcaagattatttaagtgaagatatttcttcagctctggggaaaatgccacagtgttctcctgagagaacatccttgctttgagtcaggctgtgggcaagttcctgaccacagggagtaaattggcctctttgatacacttttgcttgcctccccaggaaagaaggaattgcatccaaggtatacatacatattcatcgatgtttcgtgcttctccttatgaaactccagctatgtaataaaaaactatactctgtgttctgttaatgcctctgagtgtcctacctccttggagatgagatagggaaggagcagggatgagactggcaatggtcacagggaaagatgtggccttttgtgatggttttattttctgttaacactgtgtcctgggggggctgggaagtcccctgcatcccatggtaccctggtattgggacagcaaaagccagtaaccatgagtatgaggaaatctctttctgttgctggcttacagtttctctgtgtgctttgtggttgctgtcatatttgctctagaagaaaaaaaaaaaaggaggggaaatgcattttccccagagataaaggctgccattttgggggtctgtacttatggcctgaaaatatttgtgatccataactctacacagcctttactcatactattaggcacactttccccttagagccccctaagtttttcccagacgaatctttataatttctttccaaagataccaaataaacttcagtgttttcatctaattctcttaaagttgatatcttaatattttgtgttgatcattatttccattcttaatgtgaaaaaaagtaattatttatacttattataaaaagtatttgaaatttgcacatttaattgtccctaatagaaagccacctattctttgttggatttcttcaagtttttctaaataaatgtaacttttcacaagagtcaacattaaaaaataaattatttaagaaca

SEQ ID NO: 420 - DNA, 5768 bp, Homo sapiens
atgtcagcgattccgggagagcccgcgagggggcgagcgaccaccgctcggccgcgagctcagcgcttccctcgccgcttcccaacggccagcagagggcgcgcgcctggcgctgagcccaaccgccgcctccaacgggactggaccagaccgggtgggaccggaccgcggtttgagtccaagcccagcggtgtttgcggcgggtccggggcctggaagcgcgggggcggcgccgagaacgaaactggaaaatggccttcattggaaaagccccagtcctcggggagcagatcccccatctctggcagtgcagtgtgcctgggagctgtctggaacattccgcaacggtcactcctctgccctgcattggccttgaccacatgacccagaggtgcagggagaagcctcccttggatgcttggagtgacttcagctgctgagagtgtctaaggagagccgggaacaccgcacgcttcctgcagatggcggggcagacctgtgtgcaagagtgcctgaaggggatctcccgtggcgctacctggtccagggaggtcacagagagctcctccaccctgagcacagggggtcccaccaaggacaaggacaagattcagcaccgtcgcacacagaacagctacctggagccacaggtcactttccaaaaagggagtttccaggccagaagccatccctgcagcattgtctttgtgctccaagagaagccctggcacacacttctgctcagatggaaccactgttccctcagtgtccttgtcagtaccagctggtgactttcctactcaaacccttccctcactctctgcctcattttctcaaggtgccgtgtttgcctgaaaggacattggcagccagcaggggcggcggctggtcctctagatgggcacgaatgccattggcaggcaatggggcagactccatggaaagatgcttctcttcctcaaggtatgcactcagcggggagacctcattgtcaagttcagagttacgctgcagactgcacagcacctcgcctgcttctagggcctgctccggtcagcccaggacccaccacagcaggaccccccatcctgtgctcacccggggcttgtccatggcactggaaactccttcctgttcctgatccccctctgggcgaggggtgggcagggacatgtggctcgtgccgaggtctaatactgtgttcccagcatggaagcaggtggggacacttcctgtggcatgcaggattccgtgtagaaagctgtgactgtcacccctcctccccactcagttttgttagtggacctttccctggcccttctctccttggccccctcttggcaggagagaggaggagaggatctcactttccccctgtaccagccacaccctcggtctgcggggttcccagcagctggccagggatgctccacacctggaggtcaagtaaccgtcccctcactctgggcatcggtgccctctctggggttggaacaggaaagaaagccaagacctgtatgtgggacttgagttgagactcaattctgtagagtcaggggtgaggaggagccaggcctcctgtgtgctctccataccccagagccgggtgcccagttccatgggtcctgatggacagaagggaagaacgggggggctgctgcaccgtgggtggtaatgcagtgggagccacctccagctgaatgcccagggactcctggggctgctggccccgggtcccagcagtgggtcctgtttcttctttactcttggaatgcaggatctgccacaccaaaacgtcccctccacatttggtgaaataggaagctccatggcatgtctccatctttcaaggtgactgagaggtttattttcataggagcctcagtggccttgtccgtacccacctctgcacgtggttgcagaaagtgaaggattgtcagggagcagggcagacatttggtttatctgtgtcattggtcaaagttttgtttttcctccagaagaaaaaggcttgtgaacatgccaccgtattcttcattccttcttttggaaatgtatgaagaacgggtggcattttggagttattggcctgtgaacagctggcccagaggaagggttagatgtgggtgggtgtggccgcctctgcccctccccagcgcaggtgtgcgtgggcagcccaggcaggcgctcaggaagggtgaggtggagccctgcacgctctgagcacaaagtcctgggatcccttaaacccaagcactgccttgacagcagccagcatggctgatagaagagacacagaagtccagctgatgccagacagagggcgtcactagagagccgtgctaggtgggggtcattcaagttgtcttggcgtatgcagacgttgcttctagagagtcagaagctctatatgcgtagtgttggagcagaatttcgggatagtgatggcaagcctcctcccaagccagctggggagtatggggagggggtggccggaggaacctggcatccccgggttaggaccacagaggtggctctgcctgcagctgggcctctgcctcatcctgactccccctgctttggccatggctcttcttgtccttcctcttctcagtgcaggaggaccctgaatcaaatgcctcatcctggtttgcattttaccctcggatgaagcttgtggcgaacccctggactctgtgtctcctgagtctctgcagacctcgggtcctggacccagagactcttctccctgggacaggaggcactggggtgggtggacaggggtggcctggggcacagtagctgacggggggacttcctagttttctgggcctttccaactctgagtgtgaccttcctattcttgatcacagcccccaacttcggagcctgctagagcctgcagaatgtggcttcatcctcttcctctgtgggaaaaggcggggcctggcagtcccgccaatcttgtatatttgctccccacctcggtggtgaatacattcttgggtggtgaataggttctctccttgccttcactctagaaaagtcccctgttttgtgatgtaggatgtggtcaatgactgactcgtccctttggaccatagacgcagctctgatttctggtgttcctgggctctgcacacagcaggagccactctgggctctgagaggtgcatcttctggctcactttcttcttgttggctcttctccctgcgtcttctgccactgccctgttctgggtgggaggctgtcacactgtggtggagggtcccctctcctgcctcccctctttgatccttttctgtgagggtctgctggggtcctgtgtgtcgtgcattgttgatagattcctgtcgtgcttgctgtcctccccattctaagggacctctgattgcctgtgagcagtttacagggtcctctcctggccccttcacccgaggaattcccgcaacgcatgagtttgtgaggggcggatcctgggaggatgtgacgtcaggtgagaagggagggcccgtcctagtccggtgggctcctctaacaaagtgcattagcctggggagttactgacgctcgaaatatgtcgtcaaagttctgaaggctgagaagtccgagatcaagatgcctgaggattcagtgcctggtgaggacccattccttagggcagtgcctctagctgtgtcctcatgtggccgaaggggacaagggaggttgctggagcctgtttgatgagagcactaccttccttcaggaggggattattcagaaagtctgtctggtttcagggcattcccaaaggccccacctgttcattctaccccattggtagaattcccattgggaattaggcttcaacatacaaatttgggagacactgacatttaggccatagcgcgtcaaaggcaaagtgaggctgagtgtggaaaccatcccagaatctggatgtggcccaggcagaaggaaactcaaagtgatggggtgaccgatggtccctggtctgtgcaggactcagcggtgcggatggccctgggcacggtggcagtggctgttggaggatgatagggaacatgttggtggggggagggtggagcccactatgagtggcaactccctgggggcacaggaaacaaagctagaggtggctcccctctcccctccctgcacacagtgtcacctctgtggtggccctgtcgtccgcctcagttcacaggtgttgctgtaacaactcctgaaattaccttcaaaaggaggctcgtgcaggtgcctgcaggagccaggaggccgaagtgcatcctgagtgtccggggacaggccagcctggcggggtccacggccccacagtcccaacgactgcctcagaaatgggcagagagcatgcctggttctagctggcaaggcccacatctcagagctgtggacagtcatgaagggtccgtgagcatggagagggggcaaaaatgacccatgaacctcaggccactgtgctgccatccagccaagtgcggtaccagcccttcgggcctcgagatcctctacccttctctgggccttgctgatttcctcctccagcccctctgtttgtgtacgcacatacacacatgcacgcacgcacacgcacacccagtgcaatttctctctgctccctgtactccccaaaattcaatgggttcctctttcctcctcagagatatagtcctgggccccatctcagcctgcagaggcctgaacgtttcccaggattgtcttctaattctcaggtccggctttaaaacaaaacctaaactaaaactaaaatgctttctgcaaagaataatacaccaacataaagtccgggtatcctaagcatgtggtgtgtatggtgtctgaaattgaatatgctgtgaaactgcctgtgtcgaaatgcagtgtttcccaagacctggaggctctctccagctgctgattgtgatcacctctcccgatcaccgctgagccctgcaggtcaccttctcctgacctattacaccactgattgcttatgctgggcacaattttatacccttgctgttgttcagtctaatcatccctataaccctatcggatcattcccatatgacagaggagaaaacctggggacacaggggctgtgtcctggccaaggccttgcttgcagcaaaaggcagagctggggtctagccaggagccccagcacagtcctgttcttcccccactaaactgagctgtgaaatagatcatggcggtctggaaaacgagctaattccgtgccgatggaggtgttgatggatgtccaccactctccacttgggaggaggccttaacatccccctcaggtctagcttctctctgtgactgagtaccttgggaaagtgggctcagaggaggaaagggacttacttgcccaagggccacagctgccaagtggcaggtaagggaccgttattctcctgtccctttcacagaggacaggaggaaagtgaggacaggtggggtacatgagtttagcctcttttctgcagcaggcccagatcagctttgcacacggttggtgctgacctcaaatgcagccctagaggggcctatctctgccctgagtattgaggtgcaggcttcttcccctttgttctgtccatttccaaaaatgtgaacacacacctcctacatgtttatattattgtgtgcatagatactaccattgtaacattttttgcggattaaaaatgcactattgtattgaaaatttcaaaggaaatgtgtaataaaacatttaaaa

SEQ ID NO: 421 - DNA, 216 bp, Homo sapiens
atggggaaaaatgcaaaaaagatccgtgctcagctcacagagcagatgaaatgcctggaccagcagtgtgagcttcgggtgcaactgttgcaggacctccaggacttcttccgaaagaaggcagagattgagatggactactcccgcaacctggagaagctggcagaacgcttcctggccaagacacgcagcaccaaggaccagcaattcaagtag

SEQ ID NO: 422 - DNA, 546 bp, Homo sapiens
atgggtagtcctgcgatccaaaggcagcagtgtcaggtggaagcgctagaagcccgaggctgccattggcagaacaaagcagtctcggcctggcttggcagcatccaaaaggaccgcagccgccctgccgctgcacacgtcccagcgagcccgtgtacaacctgtcccgactccagccgcctcttcagctcgccatggatcccaactgctcctgtgccgccagtgactcctgcacctgcgccggctcctgcaagtgcaaagagtgcaaatgcacctcctgcaagaaaagctgctgctcctgctgtcctgtgggctgtgccaagtgtgcccagggctgcatctgcaaaggggcgtcggacaagtgcagctgctgtgcctgatgctgggacagccctgcccccagatgtaaataacgcgacctctacaaacctggattttttatgtacaaccctgaccctgacgtttgctacattcctttttctatgaaataatgtgaatgataataaaacagctttgacttgaaaaaaaaaaaaaaaaagagaatag

SEQ ID NO: 423 - DNA, 1110 bp, Homo sapiens
atgcaggcagcagcagccttgggaaccccgattgcccctcctcacacctgcccatcacaggacttgggcgacggggtggtgaagtcaggctgtggccccagcggcgccacgaggccgaaaaccggcgctcagcctcatcccggtggctgcggagtgccaagcgccaggtcctgcgctctgggcgtgggtcaggagcagctggcaagggcagcgcagcctatggggcctttgggcgcggccggccgcagctccgggaagccacgtcagcccacgggcgctgcagctgcagccgccaccagcacatggagcaggggtccccgaggattgggaatccccgaccaggcctgcgcctccagccgcgcggaccccggggccagcctggccgcggcaagtcaggcagtctgcggcaggagcgccgggcatgggcttcggccgggggtgcaggaggcgcgcaccctccggccggatggcggcgcactcagggctcaggaggccatcccacgggagccccgccagcccccgccggagcccgagctgcagtgccgcctgcaagtggtgcgctggctgcagctgtggcaaccccggataccgtcctcccgcctcgcacccatcagcgcggaccccgggggcgacgcagtggcgatgtcgggctgtgggcccagcggtggcactaggcggagaagcaccactcaaccccatccctgggctgcagagggcccagcgcggggggctccgagcgtcgggagcctgtggaagagaagagcgcgcgggcgacagttaaacaggccctggggcagggcgcgcctcgcgctccagggagccccgccctcccgcggcacctccgcagcaaccgccgcctgcaccgggcgcgcgagagctgctagggcggtttctctgcctcgggcctgttgggcagggccggctaaggtgcgcgtgctcgctggttctaacccttctgttgggcgtttctgcggagaggcgggaggcgctgagagtctgcgcggaggtccgtgcacagactgctttgcctgttgttgctcttcggaggcggcgatccccgaaggcgagctgaaatacggctgcaggctacaatttgcagccgacgattaa

SEQ ID NO: 424 - DNA, 1493 bp, Homo sapiens
ttgaataacagccaagttgctttggtttctattactttgttaagtcattccttctgcaaaggactgcctggcaggtgtcaaaggcagtggtggccacagaggcggtggagagatggccttcagcggttgccaggctccctatctgagcccagccgtccccttttctgggactatccaagggggtctccaggacggatttcagatcactgtcaatggggccgttctcagctgcagtggaaccaggtttgctgtggactttcagacgggcttcagtggaaacgacattgccttccacttcaaccctcggtttgaagacggagggtatgtggtgtgcaacacgaggcagaaaggaacatgggggcccgaggagaggaagatgcacatgcccttccagaaggggatgccctttgacctctgcttcctggtgcagagctcagatttcaaggtgatggtgaacgggagcctcttcgtgcagtacttccaccgcgtgcccttccaccgtgtggacaccatctccgtcaatggctctgtgcagctgtcctacatcagcttccagcctcccagcgtgcggcctgccaacccagctcccattacccagacagtcatccacacggtgcagagtgcctctggacagatgttctctactcccgccatcccacctatgatgtacccccaccctgcctatccgatgcctttcatcaccaccattccgggagggctgtacccatccaagtccatcatcctgtcaggcactgtcctgcccagtgctcagaggtgtggatcttgtgtgaagctcactgcctcaaggtggccgtggatggtcagcacgtgtttgaatactaccatcgcctgaggaacctgcccaccatcaacaaactggaagtgggtggcgacatccagctgacccacgtgcagacataggcggctccctggccctggggccgggggctggggtgtggggcagtctgggtcctctcatcatccccacttcccaggcccagcctttccaaccgtgcctgggatctgggctttaatgcagaggccatgtccttatctggtcctgcttctggctacagccaccctggaatcgagaaggcagctgactgggattgccttcctcagccgcagcagcacctggggcgccagctgctggaatcctacaatcccagaaggcgggcacagccagggagaggggaggagtgggcagtgaagatgaagccccatgctcagtcccctcccatcccccacgcagctccaccccagtctcaagccaccagctgtctgctcctggtgggagatggcctcctcagcccctcctctctgacctttaacctcactctcaccttgcaccctgcaccaacccttcacccctcctggaaagcaggcctgatggcttcccactggcctccaccaactgaccagagtgttctcttcaggggactggctcctttcccagtgtccttaaaataaagaaatgaaaatgcttgttggca

SEQ ID NO: 425 - DNA, 475 bp, Homo sapiens
ggacccagagggaaccatggaaaccccagcgcagcttctcttcctcctgctactctggctcccagataccaccggagaaattgtgttgacgcagtctccagccaccctgtctttgtctccaggggaaagagccaccctctcctgcggggccagtcagagtgttagcagcagctacttagcctggtaccagcagaaacctggcctggcgcccaggctcctcatctatgatgcatccagcagggccactggcatcccagacaggttcagtggcagtgggtctgggacagacttcactctcaccatcagcagactggagcctgaagattttgcagtgtattactgtcagcagtatggtagctcacctcccacagtgattcagcttgaaacaaaaacctctgcaagaccttcattgtttactagattataccagctgcttcctttacagatagctgctgcaatgacaactcaattttag

SEQ ID NO: 426 - DNA, 7009 bp, Homo sapiens
atgctcgaggtctccaaacaccaccagcggacattaagccagggcgggctgagtggggttaatcgtaccgggattagattagcgttattgcctagtctacatctcggactgagttcggtccccagcgtgggcgcggtctgcgagcgcggcctgggattggaggacgcgtcctgcgggagcggcctagcctcggagtgctcgccgggggctgtagtccccggagccggaagtgggggtggccgggatagaagccgcagcccaggcggcggtccctcccgctgtcgccgcccgggtgtagcgcatcacccggagcccaccggccgcaggtgcctcctccggccccagggggccccgggagccctgaagggcgaagcggcagggacgcctctcttgggcgaagaggcggcctcaccgccccggatgcggccggagggcgcgggaatggagctcggaggcggcgaggagcgcctgcctgaggagagcaggagggagcactggcagttgctgggtaatttgaagacgacggtggagggtttggtatcaaccaacagccccaacgtctggtctaagtatggtggcttggagcggctttgcagggacatgcagagcatcctctatcacgggcttatccgtgaccaggcgtgccgccgccagacggattactggcagttcgtgaaagacatccggtggctcagtccccactcagcccttcacgtggagaagttcatcagcgtgcacgagaacgaccagagcagtgctgatggtgccagtgaacgtgctgttgccgagctgtggctgcagcacagcctgcagtaccactgcctctcagcccagctccggcccctgctcggggatagacagtatatcagaaaattctacacagatgctgccttcctgctaagtgacgctcatgtcacggccatgctgcagtgcctggaagcagtggaacagaacaacccccgcctcctggctcagatcgatgcgtccatgtttgccagaaagcacgagagcccgctcctggtgacaaagagccagagcctgacagccctgcccagttccacatacacccctccaaacagctatgctcagcattcctactttgggtccttctctagcctccaccaatccgtgcccaacaatggctcagagagaagatctacttcctttccactctctggccctccccggaaacctcaagaaagcagagggcacgtctcaccagcagaggatcaaaccatccaagcccccccagtttcagtctctgcactagccagggattcccctttgaccccaaatgaaatgagctccagtactctgaccagccccatagaggcatcctgggtcagcagccagaatgattccccaggtgatgccagtgaggggcctgagtacctggccattggcaacttggacccccgaggccggactgccagctgtcagagtcacagcagcaatgccgagagcagcagttccaatttgttctcctccagcagctcccagaagccagattctgctgcctcttccttaggggaccaggaaggaggtggggagagccagctgtccagtgtcctccgcaggtccagcttctcagaggggcagacactcactgtcaccagtggggcaaagaaaagccacattcgctcccattcggataccagcattgcctccaggggagctccaggaggccccaggaatatcaccattatagttgaagatcccattgcagaatcctgcaatgataaggcgaagttgagaggccctttgccctactctggtcaaagcagtgaagtcagcacacccagctctctgtacatggaatatgaaggtggtcggtacctgtgctcaggggaaggcatgttccgaagaccatcagaaggacagtccctcatcagctacctctctgagcaagacttcggcagctgtgccgacctggaaaaggagaatgcccacttcagcatctcagagtccttaattgctgccatcgagctaatgaagtgcaacatgatgagccagtgcctagaggaggaggaagtggaagaggaagacagtgatagagagatccaggagctgaagcagaagatccgccttcggcgccagcaaatccgcaccaagaacctgctccccatgtaccaggaggctgagcacggaagctttcgggtcacctccagcagctcccagttcagctcacgtgattcggcacagctctctgactctggctctgctgatgaggttgatgaatttgaaatccaagatgctgacatcagaaggaacacagcctcaagcagcaaatccttcgtttcctcccagtccttctcccactgcttcctgcactccacgtctgctgaggcggtggccatggggctcctgaagcagtttgaggggatgcagcttccagccgcctcggagctggagtggcttgtcccggagcatgatgcccctcagaagctcctgcccattcctgactcactgcccatctcaccggatgacgggcagcacgctgacatctacaagctgcggattcgtgttcgtggcaacttggagtgggccccgccccggcctcagataatttttaatgttcatccagccccaacgaggaaaattgccgtggccaagcagaattaccgctgtgcaggatgtggcatccggactgaccctgattacatcaagcgactgcggtactgtgagtacctgggcaagtacttctgccagtgctgccacgagaatgcccagatggccatccccagccgggttctgcgcaagtgggacttcagcaagtactacgtcagcaacttctccaaggacctgctcattaagatctggaatgatcctctcttcaacgtgcaggacataaacagtgccctctataggaaggtcaagctgctcaatcaagtccggctgctgcgggtccagctgtgtcacatgaagaacatgttcaagacttgccgactggccaaggagcttctggattcctttgacacagtcccaggccacctgacagaggacctccacctgtactcactgaatgacctgactgcgaccaggaagggggagctggggccccggcttgctgagctcaccagggcaggggctacccatgtggagagatgcatgctctgccaagccaaaggcttcatctgtgagttctgtcagaatgaggatgacatcatctttccctttgagctccataagtgccggacctgtgaagagtgtaaagcgtgttaccataaagcctgcttcaagtctggaagctgtccgcgctgcgagcggctgcaggcccggcgggaggcactggccaggcagagcctggagtcttacctgtcagactacgaggaggagcccgcggaagcgctggccctggaagccgccgtcctggaggccacctgaagaaagcacgtgcagccctccctccgggccgggtcacacctgttgcagaactgagccactctttgaaggactcgccccacctggggcttctttttttttttttttttttaattatcatcatctttttttttttttttactgacttgtctgacgtctgtgtgcagtcagccgtcggcaggttgatgggtccagagtctgtggtgacagataatttgtaaacaccaggtgtttccatcagaactgacatgcgggtccttcagtgaagcttctagtgcctctgtcagtggaagagacagcaagaccaagttcttccagcgtctgtggccttctcctctaggtttcacctgcatgtcaggtatcatttccaattttcctttgtttcagttctggagcttctgagccaggcctttctcaaccacctctcctgctgctgaaacggggatggcgttttccctctccctgtcctggactggggtcagactgtgccccgaggagaagcagcagagaataggactacgtcatgggcatttcgtccacttatttgggtattttgggggccacagaacaatcctgactatcctagactcctcagagacctcagaggcagctgtgaatgtccctatgttgccgggagttcctgtttgaaatatttgaagcatagaggatgccacaagctgactttcttcatctaccttggtgatcttgaagcaaagaacagaactgatgctcaggccaggctcacctgtagccttacgccgcaagcatacgtgaggcgccagctctgtcgctgaaggagcgcttactcagaggagcggtcggccccctcttggtgttaaggtctcttagttaacctggctttttggtgcaggtgtgatctttgaagctcaggcaggtccctgatgccatcctaaggtgaggacaggaacctcacccaccatcttcttagcgtgtccctgatgactctgtcctctgttagatggtcgttgtgcttctgagtaaaagtacaacccgactccgttctctccccttcctgcagcagagctgggtccttccctggtggccgagtctctcttgccttagcttctttggtcaaagttggagaaaagcttcctgctattagtgctgttacagaacttgacggtttgtggatgtgagtgtgaatgtccctgtgttcttgggataacaagagcctttatgccaattatgcacttaactctgtgtagcctggtaatgtttatctgttcatttgataatgctgattttagtgtgctgcccccctccccccgttaatgtgtgttgatggtgaagtccttttgataatgctgattttggtgtgctgcctcccccttcccccccgttaatgtgtgtgttgacagtgaagtccttgggtggggccatgtgtgtgtttgtgatgttccttaagttgatgcagcttctaacctctgtgaaaacactggtcagagtggcttctccaagagctggcagctctgtgaactaaagcctgcatcatttttgttctgggattgaattctgcccatgggcatgtcttctcatagttgcttgctggtaggaaagaaatgggcgtgggtgctgccctggaagctgagcggaaagttgcctgtggttggtggaagctgatgagagcttgagctggcggtaagaaggagtctcccagggaagtgggagaggcattaaggtgatggccagggctgaggctccaccagcgtgagagggaacatgtgggaactggcccctgcccttgattcctctgcctcaaagttgggatctgaaagccatgtagggctagaagaccctgaggctgttctcccttctgttcatagtgagactcaaaaagccaagtcccagaagttctgaagggctgtgactagaagtgcccaggtccttcagggagctttaagaatgaccccacagaactcaagtttaactaggggttaggtcccagattcagacccaggagtttataaaaatgagctctacttccagttttggtttaaattacacatccaggccaggcacagtggctcacacctgtaatcccagcactttgggaggccagtgcgggcggatcatgaggtcaggagtttgagaccagcctggccaatgtggtgaaaccctgtctcttccaaaaatacaaaaattagctgggcgtggtggcacacgcctgtaatcccagctacttgggaggctgaggcaggagaatcgcttgaacctgggaggcagaggttgcagtgagccgagattgcgccaccgcactccagcctgggtgacagagtgagactccgtctcaaaaaacaaaaaggtgacacatccagctctttctccaggtcactgcgctggaggacagatgtgccgtcttgtcctgcctgtttcacatcagcataggatcaaaggatgacaatgctgacagcttctgaagccgaactcaacagtctcataggctcctcacttgtcacttatttttccctagctccctcaaccgcaccccatccctttagatcgtgcgtctgttttagtgactctgacacgatgccgtcctcaccttccaaatacccagttatttattcaagaggggggaagtgggtagaggatgggatgttttggaagcactttgcaagttaccactatctgaaaatcccctgctgttgcggggagaagctttgaatgcactgaagagaattccttctaaatgaaggcaggtgatagtgttctttctgtaagtaaagggaaagaaaaaaaacatagtttgcttaccaggtggagacaagattcaagacatagcagaagagtggaagacaaatattttccacttaaatgaggctgtttttgacgttctctgccaaggatttagagctttcgttgaactaacataaaaggagtgcgagtcttagtagagatgttccgtgtgtgccgcccgtgctctgaactgcgtttccacctgctgtggtgcttgtgcagcctggcagttcattgtcatctttaataaactaaggaaataaaattctgtctttcgtcagcctgccttgactgtcaagaaatggcatgtgtccactgtaaagcaggtatatctgaacattgagaaggtttctgtgttataatgtaaagcaaactggaccacacacatcaaggaaagtgaggtggagtggctgtgtctctaacttgccatgagacctcgagcgaaccacttcacttctctgggtttctggtgcatggtgtaactgtcacttaaaatgaggtgtcttcctctccgcaacatctgacttgccttagatgcttcagttcccacttctgtgagcagctagcatctttctcttctgctcctggcccactggagctccagctctacgctgcaactctctcaacatttccccttaaatgtccccttgtcatctccaaccagtgtgtctaaaaccagcataaattccgtatttccaaaaacctaaccattagtcacccaggtttgaaaattaattgtcttcaacttcctctgtaagtggcacactgagctcatcacgcatcgtctcattcctactccctgtcatcaagttctgtggatgttttcctctaaaataaatctctcattacttttctgccactagcacacaaa

SEQ ID NO: 427 - DNA, 1008 bp, Homo sapiens
atggacggcgtcttgttcagggctcatcagtgtcagtacgtgcatccttgtgtacatgtgtatgtcactgtgggcctcatggatcccctgtgcctggttggtttacacaacattggacagacctgctgccttaactccttgattcaggtgtttgtaatgaatgtggacttcgccaggatattgaagaggatcacggtgcccaggggagctgacgagcagaggagaagcgtccctttccagatgcttctgctgctggagaagatgcaggacagccggcagaaagcagtgtggcccctggagctggcctactgcctgcagaagtacaacgtgcccctgtttgtccaacatgatgctgcccaactgtacctcaaactctggaacctgattaaggaccagatcgctgatgtgcacttggtggagagactgcaggccctgtatatgatccggatgaaggactccttgatttgccttgactgtgccatggagagtagcagaaacagcagcatgctcaccctccgactttctttttttgatgtggactcaaagcccctgaagacactggaggacgccctgcactgcttcttccagcccagggagttatcaagcaaaagcaaatgcttctgtgagaactgtgggaagaagacccgtgggaaacaggtcttgaagctgacccatttgccccagaccctgacaatccacctcatgcgattctccatcaggaattcacagacgagaaagatctgccactccctgtacttcccccagagcttggatttcagccagatccttccaatgaagcgagagtcttgtgatgctgaggagcagtctggagggcagtatgagctttttgctgtgattgcgcacgtgggaatggcagactccggtcattactgtgtctacatccggaatgctgtggatggaaaatggttctgcttcaatgactccaatatttgcttggtaagaaacatcatccacaattgcctcctgccctggattggccacctctag

SEQ ID NO: 428 - DNA, 255 bp, Homo sapiens
atgccaaacttgcaggagttggacatctccaggcatttcacagagtgtatcaaagctcaggccacaacagtcaagtctttgagtcaatgtgtgttacgactaccaaggctcattagactgaacatgttaagttggctcttggatgcagatgatattgcattgcttaatgtcatgaaagaaagacatcctcaatctaagtacttaactattctccagaaatggatactgccgttctctccaatcattcagaaataa

SEQ ID NO: 429 - DNA, 8458 bp, Homo sapiens
atgcggggtgtccccgggttgccctgtcgaggttgcaggtccttctggggcggggcggcgggggggatccttccgcacggagacacttgtccagatgaaactgttaaagatggagtcaccttatacctgctacagtcggtcaatcagttactactgacagctacgaaagaacgaattgacttcttacctcactatgacacactggttaaaagtggcatgtatgaatattatgccagtgaaggacaaaatcctttgccatttgctcttgcggaattaattgacaattcattgtctgctacttctcgtaacattggggttagaagaatacagatcaaattgctttttgatgaaacacaaggaaaacctgctgttgcagtgatagataatggaagaggaatgacctctaaacagcttaacaactgggccgtgtataggttgtcaaaattcacaaggcaaggtgactttgaaagtgatcattcaggatatgttcgtccagtaccagtgccacgcagtttaaatagtgatatttcctattttggtgttgggggcaagcaagctgtcttctttgttggacaatcagccagaatgataagcaaacctgcagattcccaagatgttcacgagcttgtgctttctaaagaagattttgagaagaaggagaaaaataaagaggcaatatatagtggatatattagaaacagaaagccctctgattctgttcacattacaaatgatgatgaaagatttctacatcatcttatcatagaggagaaggaaaaagatagctttactgctgtggttatcacaggggtacaaccagaacacatacagtacttgaaaaattatttccacctttggacacgacagttagcgcatatttatcactactatattcatggcccaaaaggaaatgaaatacgaacatcaaaagaagttgaacctttcaacaatattgatattgaaatttctatgtttgaaaaagggaaggtacctaagattgtcaacctaagggaaatacaagacgacatgcagacgttgtatgtaaacacagcagctgatagttttgaattcaaagctcatgttgaaggagatggtgtagtggaagggattatccgttatcatccattcttatatgatagagaaacttaccctgatgatccatgctttccatcaaaattaaaagatgaagatgatgaagatgattgtttcatacttgagaaagcagctagagggaaaaggcctatttttgaatgtttttggaatggacgattaataccatatacatcagttgaagactttgactggtgtactcctcctaagaagagagggcttgcaccaattgaatgctacaataggatatctggtgcattattcactaatgacaaattccaggtcagcacaaataaattgacgtttatggatcttgagctaaaattgaaagataagaacaccctttttacaaggattttaaatggacaggaacagcgaatgaaaattgacagagaatttgctttgtggctgaaggactgtcatgagaagtatgataaacaaataaaatttacactttttaagggagtaattacacgtcctgatcttccttctaaaaagcaaggtccctgggcaacatatgcagcaatagaatgggatggaaagatatacaaagcaggacagctggtcaagacgatcaagacacttcccctcttttatggaagcatagtaagattttttctttatggcgatcatgatggagaagtatatgctacaggaggagaggttcaaattgcaatggaacctcaggcactatatgatgaagtaagaactgtgccaattgcaaagctggataggacagttgctgagaaagctgttaaaaaatatgtagaagatgaaatggcaaggctccctgatagattgtcagtaacttggcctgaaggagatgaattattgcctaatgaggttaggcctgctggaacccctattggtgcgttaagaattgaaatactgaataaaaaaggggaagcaatgcaaaagcttccaggaacaagccatggagggtcaaagaaactcctggttgagctcaaagttattttacattcttcaagtggaaataaagagattatttcgcatattagtcaacatggaggaaaatggccttactggtttaaaaaaatggaaaatattcagaagttggggaattataccttgaaattacaagttgtgttgaatgaaagtaatgcagacacttatgcaggaagaccactaccatctaaagcaattaagttttctgttaaagagggtaagccagagaaattttcatttggtcttctggatcttccttttcgtgttggagttccatttaatatccctctggagtttcaggatgaatttggtcataccagtcaactagtaactgatattcagccagttcttgaagcaagtggtttatctttacattatgaagaaataaccaaaggaccaaattgtgtaattcgaggtgttacagccaagggccctgtaaactcttgtcaaggcaagaattataatctgaaggttactctgcctggcttaaaagaagactcacagattttgaaaattagattactacctggtcaccctcgtcgactgaaagtgaaacctgattctgaaattttagttatagaaaatggaacagctttcccatttcaggtggaagttttagatgaatcagacaacataacagcacaaccaaaattgattgttcattgtaagttttcaggtgctccaaaccttccagtctatgttgtagattgcagtagttctggaaccagtattttaacaggatctgcaattcaagttcagaatattaaaaaagaccagacgcttaaagcaagaattgaaatacctagttgtaaagatgtggcacctgtggagaagactattaagttgcttcccagtagccatgttgcaagactacaaatattcagtgtagaaggacaaaaggcaattcagatcaaacatcaggatgaggttaattggatagcgggtgatattatgcataatcttatttttcaaatgtatgatgaaggagaaagagaaatcaatataacatcagctttagcagaaaaaattaaagttaattggactcctgagattaacaaagaacacttgctacagggtctgcttcctgatgtgcaagtaccaacatctgtaaaagatatgcgctattgccaggtttcattccaagatgatcatgtgtctttggaaagtgcgtttacagtaagaccacttcctgatgaacctaaacatttaaaatgtgaaatgaaaggaggaaaaacagtacagatgggccaagagcttcaaggagaagtagttataataattacagatcagtacggaaatcagattcaagcattttcaccaagttctttatcttctttgtcaattgctggggttggacttgatagctcaaatttgaaaacaacctttcaggaaaacacacagagtataagtgtaagaggcatcaaatttattccaggtcctcctggaaataaggatctttgttttacttggcgtgagttttctgactttattcgagtgcaactaatttctggacctcctgctaaacttctccttatagactggccagaactaaaggagtccattccagtgattaatggaagagatttacagaaccctattattgttcaactttgtgatcagtgggataatccagcaccggtacaacatgttaaaataagtcttacaaaagctagcaatttaaagctcatgccttcaaaccaacagcataaaacagatgagaaaggcagggctaatttgggagtattcagtgtttttgcccctaggggagagcatactcttcaggttaaagccatctataacaaaagtatcatagaaggacctataattaagttaatgattcttccagacccagaaaaacccgttcgtctcaatgttaaatatgacaaagatgcatccttcttagcagggggtcttttcactgattttatgattagtgttatttctgaagatgacagtatcattaaaaacattaatccagcacgtatttccatgaaaatgtggaagctgtctaccagtgggaaccgacccccagcaaatgcagaaacatttagttgtaataaaataaaagataatgacaaagaagatggctgcttctatttcagggataaagtaattcctaataaagtggggacatattgtatccagtttggttttatgatggataaaacaaatattctcaacagtgaacaggttatagttgaagtcctgcctaatcaacctgtgaagttagtacctaaaattaaaccacctacaccagctgtttcaaatgttcgctcagttgccagtaggaccttggtcagagatctacatcttagtatcacggatgactacgacaaccatactggaattgatttggttggcactataatagccaccattaaaggctctaatgaggaagatactgataccccactttttattgggaaagttagaacacttgaattccccttcgtgaatggttcggctgaaatcatgagtctggtgctggcagaaagtagtcctggaagggatagtactgaatattttattgtatttgagccccggctaccacttttatcaagaaccttagaaccatatatcctaccgttcatgttttacaatgatgttaagaagcagcaacaaatggcagcacttacaaaagaaaaggaccaattatctcagtctattgttatgtataaaagtttatttgaagccagccaacagcttcttaatgaaatgaaatgtcaagttgaagaagcaagattaaaagaggcccaattgcgaaatgaactaaaaatacataatattgacattcctacaacacaacaggtgccacacattgaagcacttctgaaaagaaagctatcagaacaagaagaactgaagaaaaaacctagaagatcgtgtactcttccaaactatactaaaggcagtggagatgttttgggaaagattgcacatctagcacaaattgaagatgatagagctgcgatggttatttcttggcatctggcaagtgacatggactgtgtagtcaccctaaccactgacgctgcacgtcgtatctatgatgaaacccaaggtcgtcagcaggtgttgccccttgattctatttacaagaagactcttccagattggaaaagatctctacctcatttccgaaatggaaaattgtattttaaacccattggagatccagtctttgctcgagacttgttaacatttccagataatgtagaacattgtgaaacagtatttggtatgctgttaggagacaccattattttggataatctggatgcggccaatcattatagaaaagaggttgttaaaattacacactgtcctacactgctgaccagagatggagatcgaattcgaagtaatggaaagtttgggggccttcagaataaagctcctccaatggataaacttcggggaatggtatttggagctccagttccaaaacagtgtctgatcttaggggaacaaatagtgcatgcctgtgttcccagctactcaggaggctaagacaagagtgtcgcttgagcccaggagtttgaggtcagcctgggcaacgtagcaagactccatctcttaaaaaaaaaaaaagaagaaatttctgtcattattgaataaatcttcttcagcagtatcgttctgctgtgtgcaaactagacagtgtgaataaggatcttaacagtcaattagagtaccttcgcactccggatatgaggaagaaaaagcaagaacttgatgaacatgagaaaaatctcaaactaatagaggaaaaactaggtatgactcccatacgtaagtgtaatgactcattgcgtcattcaccaaaggttgagacgacagattgtccagttcctcctaaaagaatgagacgagaagctacaagacaaaataggattataaccaaaacagatgtatgagaggtgacagagagaagaggccattggtctcagtaagaatgccctgctttctgcatctctgtttcagaagaccaagagggtgacttaccagactgagtatttctggggacaatacaagtacctgggcatgaatttccatttcgattcagatgggactggaaacaaccattcaattttatgaatcttactggacattatggatttactggaattattccagacattatgccctttggttgtcactaccttgcaaatgtgtaagaggaaaatgtgctaatgtggcagtgactgtaaaactggcacatggcatttattaatcctgaagaaaagtacatgtactatttttcagtataaatataatgaacatgtcagaactatttcttgaaaacctttttattacttttgcgtgaatttatttaacaaagatgttttgtcttttgtgtaagggaggttctagaggctagatgtttaattgtaaatatgtgaggaaactcaatgcagaattcaggataaaaattttaaaagcacaggtatttgggaattgaaatgttaagatacccagaacaacattaaatcaatgagtgaacttgtgacagtggtagcatttcaaatttcaaaagacttatcctgtgtgtgtgtgtgtgtgtatatatatatatatatataaatatatatatataaaatattcagcagcaccaagttttataactattgtttgtttgactttattaatactagaatatgtagtctcagccttaattttacatttacattattttgtaattttttattactatttttaaggggttaaagagaacatacattctcacattagtgtactttctggtagaaagttgctgcaaaaacatttgaaatgtatattaacctaatgtatgtcatatatatgtctttgtgtaagttcaagactattgatctgtgaagttattttgtaaggacatacatttggtaagtaagtttgtgtcccaggaaatgtatgtgtttttaaaccctttctaaatatgcaggccattaataaataagattgtttcttccctactgaatagataagtgtttttcttttttaaaattggaagcttcataaaagttatcttgttaaaaaacgatgatgatgttaacctatctttataattggaaattatttaaactgtttgttgttacagaagaaacaaaatggtaattacagaattagctgtggggaagattggctcccatggtactacaggttgagtatcccttattcaaaatggttgggacctgaagtgttttggattttggttttttgtggggtttttaaattattattttggaatatttgcattatatttaccaatttagcatccctaatccaaaaatctttcattagaaattggaaatgcttcaatgagcatttcccttatgtgtcatatctgcgctcaaatgttttgaattttggaacatttcttgtttctgacttttagattagggatactcaccccgtaccaatatttggagtccttagacattagattatatgaaaatgattgattgataggtaagaaaggttaaagagaaatgactttttaggaactagacttgaacgtataattaatatgtggaactagtttgcttttataattcattgtatcaagaaggagtcatgttttaaatccaaggcattgagactatctagaagcaaaaaagttggttttaaaaattctttttattagaagtgtgtttaaaaacatgtctttttttcccttgagcgacagtggcctcactacattgcccaggctagtcttgaactcctgggttcaagcagtcttcctgccttggcctcctaagtagcagggattacaggcatgcacccacatgccaatttttattgcttaaaatggcgagttctatggatattatctagccccaagcccatatctgtacacttttgttcattttataataccagaaagaatgttctatcagtaaaagaaggtttttaagtatgaatctccatttttgtggagtttttctaccctgtaaaaattaactttgtggttcccagtaattacagtaaggagtttttctatattttcacagttggatttatctaaggatatttctcagcatattaaggaatccttttctacatttgagcaaatactgaggttcatgttgtaccaaataataataaattgcttttgtgtttaatatgtaacacgtaagaacaattgaaattttcttctaagatttaatactagtcttttagtataaaggaatgtaactggagaaaaaaattaatgctacagccatttatcctgtgttatgtgttatataatctgaaatttgtcacaatgttacaatcaggaagttttttttctggtttcttcttccaaaggaaaataatagcctacttgtattttgaagtaactgaaataaaactctctccaagcctttttgcacattacgtt

SEQ ID NO: 430 - DNA, 1228 bp, Homo sapiens
atgtaccgcgccaaaacaggaagggctgagacccccacctcggccagcagcatcactggagcccagggcagggtcagcagtgctggccgtggggccctctctcagccaggaccaaggacagcagcctccaccaagggcccatcggtcttccccctggcgccctgctccaggagcacctccgagagcacagcggccctgggctgcctggtcaaggactacttccccgaaccggtgacggtgtcgtggaactcaggcgctctgaccagcggcgtgcacaccttcccggctgtcctacagtcctcaggactctactccctcagcagcgtggtgaccgtgacctccagcaacttcggcacccagacctacacctgcaacgtagatcacaagcccagcaacaccaaggtggacaagacagttgagcgcaaatgttgtgtcgagtgcccaccgtgcccagcaccacctgtggcaggaccgtcagtcttcctcttccccccaaaacccaaggacaccctcatgatctcccggacccctgaggtcacgtgcgtggtggtggacgtgagccacgaagaccccgaggtccagttcaactggtacgtggacggcatggaggtgcataatgccaagacaaagccacgggaggagcagttcaacagcacgttccgtgtggtcagcgtcctcaccgtcgtgcaccaggactggctgaacggcaaggagtacaagtgcaaggtctccaacaaaggcctcccagcccccatcgagaaaaccatctccaaaaccaaagggcagccccgagaaccacaggtgtacaccctgcccccatcccgggaggagatgaccaagaaccaggtcagcctgacctgcctggtcaaaggcttctaccccagcgacatcgccgtggagtgggagagcaatgggcagccggagaacaactacaagaccacacctcccatgctggactccgacggctccttcttcctctacagcaagctcaccgtggacaagagcaggtggcagcaggggaacgtcttctcatgctccgtgatgcatgaggctctgcacaaccactacacgcagaagagcctctccctgtctccgggtaaatgagtgccacggccggcaagcccccgctccccaggctctcggggtcgcgtgaggatgcttggcacgtaccccgtgtacatacttcccaggcacccagcatgggaaataaagcacccagcgctgccct

SEQ ID NO: 431 - DNA, 1041 bp, Homo sapiens
agtgctgccgggcaccggggaggcaggttggtgtacgctgtgcgcggcggacgtcagaggcagcggggagcggagcggggccgccggggcctctccagggccgcagcggcagcagttgggcccccgccccggccggcggaccgaagaacgcaggaagggggccggggggacccgcccccggccggccgcagccatgaactccaacgtggagaaactgcccccgcacatcatccgcctggtgtacaaggaggtgacgacactgaccgcagacccacccgatggcatcaaggtctttcccaacgaggaggacctcaccgacctccaggtcaccatcgagggccctgaagggaccccatatgctggaggtctgttccgcatgaaactcctgctggggaaggacttccctgcctccccacccaagggctacttcctgaccaagatcttccacccgaacgtgggcgccaatggcgagatctgcgtcaacgtgctcaagagggactggacggctgagctgggcatccgacacgtactgctgaccatcaggtgcctgctgatccaccctaaccccgagtctgcactcaacgaggaggcgggccgcctgctcttggagaactccgaggagtatgcggctcgggcccgtctgctcacagagatccacgggggcgccggcgggcccagcggcagggccgaagccgggcgggccctggccagtggcactgcagcttcctccaccgaccctggggccccagggggcctgggaggggctgagggtcccatggccaagaagcatgctggcgagcgcgataagaagctggcggccaagaaaaagacggacaagaagcgggcgctgcggcggctgtagtgggctctcttcctccttccaccgtgaccccaacctctcctgtcccctccctccaactctgtctctaagttatttaaattatggctggggtcggggagggtacagggggcactgggacctggatttgtttttctaaataaagttggaaaagcaaaaaaaaaaaaataataataataata

SEQ ID NO: 432 - DNA, 285 bp, Homo sapiens
atggttgttcagtttcttggttttcttttagctttggaatcgtcctctgggaaatcgccactggagatatcccgtttcaaggtgaagaatgtgaagactggctcagccagtggctgtaattctgagaagatccgcaagctggtggctgtgaagcggcagcaggagccactgggtgaagactgcccttcagagctgcgggagatcattgatgagtgccgggcccatgatccctctgtgcggccctctgtggatgagcagaagcgcagacttaatgatgtgttctga

SEQ ID NO: 433 - DNA, 1233 bp, Homo sapiens
gggggtgaggcaccccccgcaatgcggggagggctgagactggggtctgggctgttccggacttcaacactcaccccttgtccccccgcagggctatggcgtgtgcttggtggggctggagcggctggcttacctcctcatggcttacagcctgggcacctcagccgcctcactcctgggcctgctgggcctgtggctgccacgcccggtgcccctcgtggctggagcaggggtgcacctgctgctcaccttcatcctctttttctgggcccctgtgcctcgggtcctgcaacacagctggatcctctgtgtggcagctgccctttggggtgtgggcagcgccctgaacaatactggactcagcacactcctgggaatcttgtacaaagacaaggagagacaggacttcatcttcaccatctaccactggtggcaggctgtggccatcttcaccgtgtacctgggctcaagcctgcacatgaaggctaagctggcgatgctgctggtgacgctggtggcggccgcggtctcctacctgcggatggagcagaagctgcggcggggcgtggccccgcctcagccccgcatcccgcggccccagcacaaggtgcgcggttaccgctacttggaggacaactcggaggagagcgacgctgaggacgagcatggggacggcgcggaggaggaggcgccgcccgcggggcccaggcctggccccgagcccgctggactcggccgccggccctgcccgtacgaacaggcgcagaggggagacggaccggaggagcagtgaggggccgcctggtccccggactcagcctccctcctcgccggcctcagtttaccacgtcttaggtcggggggaccccctctgagtcccgcgctgtattcaaaggcccctgtctcccctcccccacattggggacgcccctcccagagcccgggtcacctccgggcttccgcagccccctccaaggcggagtggagccttgggaacccctcggccaagcacaggggttcgaaaatacagctgaaaccctgcgggcccttagcacgcgccccagcgcgggagcagggtcagggtcttcttgcgacccggccccgctccagatcctcccagctgtcggccgcggacccgggccgcgtgtgaccgcgctttgcacctcctatccccagggtccgccgagagccacgatttttttacagaaaatgagcaataaagagattttgtac

SEQ ID NO: 434 - DNA, 1605 bp, Homo sapiens
atgacccccatcgtcacagtcctgatctgtctcgggctgagtctgggccccaggacccacgtgcagacagggaccatccccaagcccaccctgtgggctgagccagactctgtgatcacccaggggagtcccgtcaccctcagttgtcaggggagccttgaagcccaggagtaccgtctatatagggagaaaaaatcagcatcttggattacacggatacgaccagagcttgtgaagaacggccagttccacatcccatccatcacctgggaacacacagggcgatatggctgtcagtattacagccgcgctcggtggtctgagctcagtgaccccctggtgctggtgatgacaggagcctacccaaaacccaccctctcagcccagcccagccctgtggtgacctcaggaggaagggtgaccctccagtgtgagtcacaggtggcatttggcggcttcattctgtgtaaggaaggagaagatgaacacccacaatgcctgaactcccagccccatgcccgtgggtcgtcccgcgccatcttctccgtgggccccgtgagcccgaatcgcaggtggtcgcacaggtgctatggttatgacttgaactctccctatgtgtggtcttcacccagtgatctcctggagctcctggtcccaggtgtttctaagaagccatcactctcagtgcagccgggtcctgtcgtggcccctggggaaagcctgaccctccagtgtgtctctgatgtcggctatgacagatttgttctgtacaaggagggggaacgtgaccttcgccagctccctggccggcagccccaggctgggctctcccaggccaacttcaccctgggccctgtgagccgctcctacgggggccagtacagatgctacggtgcacacaacctctcctctgagtgctcggcccccagcgaccccctggacatcctgatcacaggacagatccgtggcacacccttcatctcagtgcagccaggccccacagtggcctcaggagagaacgtgaccctgctgtgtcagtcatggcggcagttccacactttccttctgaccaaggcgggagcagctgatgccccactccgtctaagatcaatacacgaatatcctaagtaccaggctgaattccccatgagtcctgtgacctcagcccacgcggggacctacaggtgctacggctcactcaactccgacccctacctgctgtctcaccccagtgagcccctggagctcgtggtctcaggaccctccatgggttccagccccccacccaccggtcccatctccacacctgcaggccctgaggaccagcccctcacccccactgggtcggatccccaaagtggtctgggaaggcacctgggggttgtgatcggcatcttggtggccgtcgtcctactgctcctcctcctcctcctcctcttcctcatcctccgacatcgacgtcagggcaaacactggacatcgacccagagaaaggctgatttccaacatcctgcaggggctgtggggccagagcccacagacagaggcctgcagtggaggtccagcccagctgccgacgcccaggaagaaaacctctgtgagtga

SEQ ID NO: 435 - DNA, 515 bp, Homo sapiens
caaaactgacaagtcaaggcaggaagatgtcgccatcacaactcattgggtttctgctgctctgggttccagcctccaggggtgaaattgtgctgactcagtctccagactttcagtctgtgactccaaaggagaaagtcaccatcacctgccgggccagtcagagcattggtagtagcttacactggtaccagcagaaaccagatcagtctccaaagctcctcatcaagtatgcttcccagtccatctcaggggtcccctcgaggttcagtggcagtggatctgggacagatttcaccctcaccatcaatagcctggaagctgaagatgctgcagcgtattactgtcatcagagtagtagtttacctcacactgtgttacaacccagaacaaaaactagttcagcctggctgaacggagaaactgggtgataccctagaatacttctgattgttacaggtgctttgggggcaatgagttaaccaatacaatgaagtctggctcacccagcagag

SEQ ID NO: 436 - DNA, 2431 bp, Homo sapiens
ttaaggcggaggcccgggagggggccgacccggctcgccagctccacgctcggctccagactccggcatttcctccccgctagctggcgcggcctcgcctccccctcggaagaggaaactcccggggtccgagtaacagggtcaggcgcggagaggagcggcgggagagccaggagggccgcccaggctatgtcctcctgcgctgtcgccacgctgtccggcagcgcttcctgcccgggtctccccgtctggagggtcacgccgccttctcctcgagacacttccgagagccgggcctcagcatcctgctggagagttactacgagcatgaggtgcgcctgtctccgcacgtgttgggccacagcaaggcgcacgtgagccggatcgtgggcgagctggtgcgggctggccgcgcccgggggtcccccggtctcattcctgggggagcgctggccttggccttccgcggagacttcatccaggtgggcagcgcctacgagcaacataaaatccgccggcccgacagcttcgacgtgctggtgccactgcgcctcccgccgcttgtggcgctggagccacggagcctgggcgaggagccagcgctggccccggccttccgcggctgcttcttgtgcgccctcaaggcaccaccctcaccatcgggggcctcggggggccactggcttcgggactgcaaaccctttgctgatgccttctgcgtggatgtgcgcgggcggcgtcacctctctgctactctggtgctgcgctggttccagtcgcatctgcagcgctccttggccactgtgcgttacagcctggaggggcgctgtcgggtcaccttgaccccaggtggcctggaacagccccccaccttacacatcttgccctgccgcactgactacggctgctgccgcctttctatggctgtgcgtctcatccccgctgtccatctgggagatggggtcttccttgtggcgccaccaccgccacccttgcccagcgcgcccctgttggagctccctgagggcctgcgtgcggaggcactgtggggtgtgaacacagcacgccaggagcagaagctgctgagttggctgcaggaacgggcagctccaggtgcctgctacctcaagtgcctgcagttgcttaaggctctgcgcgatctgggggcccgtgggctggactcagcggccgccacccagtggggacgcatcctatcctcatatgtgctcaagacagtgctgctggcagtgctgctgcgcaagggggcccctgggcaaggctgggacgaggagcacctgggaaggtgtttggaggagttggtgcagttccttagggactgcctgctgcgacgccatacgctcttccactgcgtcctgggccctggtggggcggctgccgaggtgggtcccctgcccaaggcactgagggaagccgccccagttgacctcctggccgctttcgacgggcacgcccgggaacttgcagcagcgcggttgctgtccacgtggcaaaggctgccccagcttctccgggcctacgggggtccccgctaccttgccaggtgccccccaccccggagtcagcgcacccagggcttccttgaaggtgaaccgtaaaccctgacagcacccccacctgaccaaatgctcctaaagcctttcccactgggtgggggtgggaatggcggtgaagccagttaaatgcaagattgcagaaggcattggaaaatttggtggctgccacaagctttagtggcttaaatatcaccttctcgcttcacagtccagtataatatgacatcttcacacccactagagtgtcctgggcaaaccatgggaagacatccaacaggagacccaagaattggttcaaatattgttctgtgtagacggattctgtagaaggatgtggcttttagagaagtccagtagaagaagcaagaactagctgcagggaaagttccttctgtcggtttttagacacagatctctctgcccaaattaaaaaaaaacaaaacaaaacactaaagtttttgacacaattacttgctaggtactgggttcctgattgtctttaaaaagaaaaatctgaatctttatttgcaactggaattgaagttctattttaggggctaatgtttagaggaacataatttccactgttcaaattaatattaatgtatttttaaaatggtgcaatcacaggtgtttgacaagattgtcaacaagttaagtcacatagatggaaaggcaatcgagagttggttagagaagcttccagagaaaatagcactttatattgatcaattcactcattttgtggtaattgctagcaccaagcattgcatctgaaagggaagccagttatatttattattaaatgtacaaccttgaaaagcagccagcatgcttgcctaactaacatcgccgca

SEQ ID NO: 437 - DNA, 778 bp, Homo sapiens
gtggttctactatgccttctgaccccgtcttggacttcaactgggagaatgtggagccatttgaacaggctcctcttctggagcatattttcttctgtcacttgtagaaaagctgtattggattgtgaggcaatgaaaacaaatgaattcccttctccatgtttggactcaaagactaaggtggttatgaagggtcaaaatgtatctatgttttgttcccataagaacaaatcactgcagatcacctattcattgtttcgacgtaagacacacctgggaacccaggatggaaaaggtgaacctgcgatttttaacctaagcatcacagaagcccatgaatcaggcccctacaaatgcaaagcccaagttaccagctgttcaaaatacagtcgtgacttcagcttcacgattgtcgacccggtgacttccccagtgctgaacattatggtcattcaaacagaaacagaccgacatataacattacattgcctctcagtcaatggctcgctgcccatcaattacactttctttgaaaaccatgttgccatatcaccagctatttccaagtatgacagggagcctgctgaatttaacttaaccaagaagaatcctggagaagaggaagagtataggtgtgaagctaaaaacagattgcctaactatgcaacatacagtcaccctgtcaccatgccctcaacaggtaagagcaacctgagttctttcagccaggtctgaactcacttccagaaactgcagctgctcctctgcccacccattt

SEQ ID NO: 438 - DNA, 1233 bp, Homo sapiens
gggggtgaggcaccccccgcaatgcggggagggctgagactggggtctgggctgttccggacttcaacactcaccccttgtccccccgcagggctatggcgtgtgcttggtggggctggagcggctggcttacctcctcgtggcttacagcctgggcacctcagccgcctcactcctgggcctgctgggcctgtggctgccacgcccggtgcccctcatggctggagcaggggtgcacctgctcctcaccttcatcctctttttctgggcccctgtgcctcgggtcctgcaacacatctggatcctctgtgtggcagctgccctttggggtgtgggcagcgccctgaacaatactggactcagcacactcctgggaatcttgtacgaagacaaggagagacaggacttcatcttcaccatctaccactggtggcaggctgtggccatcttcaccgtgtacctgggctcgagcctgcacatgaaggctaagctggcgatgctgctggtgacgctggtggcggccgcggtctcctacctgcggatggagcagaagctgcggcggggcgtggccccgcctcagccccgcatcccgcggccccagcacaaggtgcgcggttaccgctacttggaggacaactcggaggagagcgacgctgaggacgagcatggggacggcgcggaggaggaggcgccgcccgcggggcccaggcctggccccgagcccgctggactcggccgccggccctgcccgtacgaacaggcgcagaggggagacggaccggaggagcagtgaggggccgcctggtccccggactcagcctccctcctcgccggcctcagtttaccacgtcttaggtcggggggaccccctctgagtcccgcgctgtattcaaaggcccctgtctcccctcccccacattggggacgcccctcccagagcccgggtcacctccgggcttccgcagccccctccaaggcggagtggagccttgggaacccctcggccaagcacaggggttcgaaaatacagctgaaaccctgcgggcccttagcacgcgccccagcgcgggagcagggtcagggtcttcttgcgacccggccccgctccagatcctcccagctgtcggccgcggacccgggccgcgtgtgaccgcgctttgcacctcctatccccagggtccgccgagagccacgatttttttacagaaaatgagcaataaagagattttgtac

SEQ ID NO: 439 - DNA, 2125 bp, Homo sapiens
ctagaaatcaattatgttttgatcatcatctatgccctgatgtttctactgaacgtgatgtgaaactccctgccgatgctggtcatcttattcagctgagtcagccactgtcaccgatgtctacctgctgaccctggccttggccgacctgttcttttccctgacattgcccatcttggctgcctccaagatgaatggctggatttttggcacaatctgtgccaggtggtctagctcctgaaggaagtcaacttctacggtggtattctactactggcctgccgcagcatggactgttacctggccattgtccatgccacacgcacactgacccagcagcgccacttggtcaagttcatatgtctgggtttgtggaacctgttcctgttactgtccctacgcatcttgcttttccgaaggaccttctacccatccaatgttagcccagtctgctatgaggacatgggcaacaatacagcaaactggtggatgctgttacggatcctgccccagtcctttggcttcatcgtgccgctgcgatcatgctgttctgctacagattcaccctgcatacgctgtttaaggcccatatggggcagaagcactggaccatgtgggtcatctttgctgttgtcctcattttcctgctctgctggctgccctacaacctggtcctgctggcagacaccctcatgggaacccagatgaccaatgagacctgtgagcgccgcaacgacatcaaccaggccctggatgccactgagattctgggcatccttcacagctacctcaatcccctcatctacgccttcattggccagaagttttgccatggacttctcaagattatagccatacacggcttgatcagcaaggactccctgcccaaagacagcaggccttcctttgttggctcttcttcagggcacacttccactactctctaagacctcttgcctaagtgcagtcccgtggggttcctcccttctcttcacagtcacattccaagcctcatgtccactagctcttcttggtctcagtgtcagtgcagcccccactgtggtcgcaggaagcagaggaggccacgttcttactagtttcccttgcatgatttagaaagcctgccctggtacctcaccccttgccataattactacatcacttgctggagctctgtccctcctgcccttgagctcatggcactctatgttctaagaagtgaaaatctacactccagtgagacagctctgcatactcattaggatggttaatgtcagaagaaagaaaatcataaaatagaaggtgtccacaaaggtgcagagaaagtggaattctcgggcatcgtgagcgggaatgtaaaatgttgtggccactgcggaagacagtatggcatctttcctcaaaacatcagacatagaattaccacatgatcctgcaattccacttgtagtaattgacccacaagaagtgaaagcagggacttgaacacatatttgtacaccaatattcatagctgcttattcataagacccaaaaggcagaaacaacccaaatgttcatcaatgaatgaatgaatgaatggctaaacaagatgtgatgtgtacaatgttcatcaatgaatgcatggctaagcaaaatgtgatatgtacataacgaagtatccttcagcctgaaagaggaatgaagtactcatacttgttacaacacggacgaaccttgaaaacttcatgctaagtgaaataagccagacataaacagataaatagtttatgattccacttacatgaggtactgagagtgaacaaattcacagagacagaaagcagaacagtgattaccagggactgaggggaggggagtatggggagtgatggtttaatgggcacagagtttatgtttgggatgttgaaaaagttgtaaagataaacagtagtgatagttgtacaataatgtctgagtacttaatgccactaaactgtacacttaaatgtctaaaatggtaaaattttatgtatattttacctcaattaaaaagaaaacaccttggcccccaaaggtacttttgccaaagaaccaaggctgaaatttcttgctaaatgagataattaaatgtctttcattgctt

SEQ ID NO: 440 - DNA, 2972 bp, Homo sapiens
acagtcgcacgcagccaggcgcgcactgcacagctctcttctctcgccgccgcccgagcgcacccttcagcccgcgcgccggccgtgagtcctcggtgctcgcccgccggccagacaaacagcccgcccgaccccgtcccgaccctggccgccccgagcggagcctggagcaaaatgatgcttcaacacccaggccaggtctctgcctcggaagtgagtgcttctgccatcgtcccctgcctgtcccctcctgggtcactggtgtttgaggattttgctaacctgacgccctttgtcaaggaagagctgaggtttgccatccagaacaagcacctctgccaccggatgtcctctgcgctggaatcagtcactgtcagcgacagacccctcggggtgtccatcacaaaagccgaggtagcccctgaagaagatgaaaggaaaaagaggcgacgagaaagaaataagattgcagctgcaaagtgccgaaacaagaagaaggagaagacggagtgcctgcagaaagtgagtgccttctagccttacccttcctctcgctcacgcctgtcttcaccagcttcatgtggctatcagaagaagagttagaaaaccccctacttggttatagtttcccaagaagggccttgtagctggtagcagaaatgccagttgcagaatgaggaggtggcaaagcagttaacacaatggatgtgacggtggatgtataaaaacaggtgtgtgaattcgtctgatgcctgactcccagcagcctcggccggttcatacatgtccatcagcttccaggctgcaggacatgccagcccagttaaagaggcttcacttgactgttttcctgagaaaaggaagctgccagctctcatttggctcactatgaaaagcctttaattaatctcttcaaacaagttatttccttaatccacaagcagtggttacacttgctttgcattcttgtctggttcctaactctagagcccttctccctggcttagccagtaagctgagcccctggctgcgttcagccggcccgcctgagagacactaggggaaatagcttttgtgggcaagcagggtggccggtggtgctcagcagtctttccagtggctgtgtccctcctccaaatgtggacaggccatgacagagtcttagcccaagtcccacagatccccaaaagttctgttgattgcttcaggggatcagtgaaaattagggaattttgtgtgttgctatatacattttttctggggagatgagcttctcattgagatctgtgactcagaatcgactaagccaccataagtctggatttctccccagctcccaaggcccttttgggtccagaagacctgcatatgggctgttgactcatgcaaatgaggtatctgaactgcagcttcagtattagcagagccacaggccgcctctgtggcatcaccagggtttctctgaagaagagggtctgcattttcctaaacccagtgctgctctcccatctcccatcttcctctcgcagcttgatgagccccggtgtgtcccaggagtcggagaagctggaaagtgtgaatgctgaactgaaggctcagattgaggagctcaagaacgagaagcagcatttgatatacatgctcaaccttcatcggcccacgtgtattgtccgggctcagaatgggaggactccagaagatgagagaaacctctttatccaacagataaaagaaggaacattgcagagctaagcagtcgtggtatgggggcgactggggagtcctcattgaatcctcattttatacccaaaaccctgaagccattggagagctgtcttcctgtgtacctctagaatcccagcagcagagaaccatcaaggcgggagggcctgcagtgattcagcaggcccttcccattctgccccagagtgggtcttggaccagggcaagtgcatctttgcctcaactccaggatttaggccttaacacactggccattcttatgttccagatggcccccagctggtgtcctgcccgcctttcatctggattctacaaaaaaccaggatgcccaccgttaggattcaggcagcagtgtctgtacctcgggtgggagggatggggccatctccttcaccgtggctaccattgtcactcgtaggggatgtggagtgagaacagcatttagtgaagttgtgcaacggccagggttgtgctttctagcaaatatgctgttatgtccagaaattgtgtgtgcaagaaaactaggcaatgtactcttccgatgtttgtgtcacacaacactgatgtgacttttatatgctttttctcagatctggtttctaagagttttggggggcggggctgtcaccacgtgcagtatctcaagatattcaggtggccagaagagcttgtcagcaagaggaggacagaattctcccagcgttaacacaaaatccatgggcagtatgatggcaggtcctctgttgcaaactcagttccaaagtcacaggaagaaagcagaaagttcaacttccaaagggttaggactctccactcaatgtcttaggtcaggagttgtgtctaggctggaagagccaaagaatattccattttcctttccttgtggttgaaaaccacagtcagtggagagatgtttggaaaccacagtcagtggagcctgggtggtacccaggctttagcattattggatgtcaatagcattgtttttgtcatgtagctgttttaagaaatctggcccagggtgtttgcagctgtgagaagtcactcacactggccacaaggacgctggctactgtctattaaaattctgatgtttctgtgaaattctcagagtgtttaattgtactcaatggtatcattacaattttctgtaagagaaaatattacttatttatcctagtattcctaacctgtcagaataataaatattggaaccaagacatggtaaa

SEQ ID NO: 441 - DNA, 1471 bp, Homo sapiens
cccgccccctcgacgccccctcctcgccgaggcggggaggagctcagtagggggaggggtctggagagggatggagaatagagagagcaaggctcagggaagtgcaggggacctgagtatttgctgtacccaccaccgactctgcagggatccgggagaacctaagtgacttgtgcgattccgtggaccctggggagaatggtccattctgggcatacctggaggctctggccaacagttcccccagaattctccaggtgggggcaggggaagaggcgggccccgccaactcttcagcaacccaaaatcttaacggcagacccagaacagcagggtgtccttaatgtccccaagtaacctgaagatgctgtgtagcccggagaggggctgaagtgtgcatgactggggtctggtttggctgtagaccaatctgaacccaaaggtagaaacacgctgggctctgaaagccaggctgaagtctgctaactgacaaattcatcccaagtccatctccaggcagtctgggctgtgtcaggatgccttcctacaggccctgctggagatgatacaaacaacgggaggaagagaggagagatccaagaatcaacactcctcctgctgctccatccatcactgcccctcaccttctgtgaagggccccaacacaagccctgcttcataccctcttcaatcaggactcaagtcacagaaaggttacctgattcttttatttaagaaaagtgaaatacatggacctgaagtgagacagcagagggagggagtaagagcggccagggcaaggcagcttggctggccagcccccaaccctctgactgaaaagccagcagcaggctgcatctctgagggccatacctgctttgtacccaccttggggcctcagagctagctactctagaggaccacagggtgcagagagggtgtcctgagggtccttcctaagagggattcctgaggagggagctgagaccctaagggcagcagcaatcttctggttaaactgctccccttcactgtcccacctaggggtggggaagagccaggagcaatggggaatgctgtgagggctgtgggggtggggggacccagcagacctgggggccgggttgaatgtcagctgcttgaagagaggtccatggtgctggcactgaggccccgggagacctgaaacagacaacactaccccatcagctcagggacctcggcctcccaaagactggctcctagagtccatccatcccatggtcacagtgtatctctggacctaggatcacatctgtctctggaccagtctatctctggacctgggactttgtttagcctctgctagggttttccagaaggccacaatctggtggagaagctacctggaagaaccacatgaatactggcatatacttgtgtgttgatacaagaagtcatttgccattaaaatatcactagtgttttctca

SEQ ID NO: 442 - DNA, 1158 bp, Homo sapiens
atggagtcgcagaaagaggcgcgaaaccccgtcgcgcgaccgcctggggcctcaaggtctcagacgccaaactacaaggagcagcgggagggcggcgcagtgctggcgacggctgccctgggaacagaggcggacgacgctagtgcgggcgggctgtgggagctgcaggtggagccgaggagctgaggcctgcgtgcagccgctgcaagccggcctcagaaagtgtgtttttgtccatttctcccagcgcaccctttgcatatctctacctacttgtgcataattcagcatccagcagaggaagacaaaatgttgcggacagttcctctaccagcagcatgcctcccccaggacaagcgcaaagtgaagactggtcgtcgcttcagtgaagaaagagatcctgaactttcaactgtttgccggaagtttggtacattaatgttatatccaggggctaatatagaagctgctaatctggaagaatttatattagattctcctgtttatccttctacaatcatcgtcattgatggtacacggagccaggctaaggacattttctgtaagaattccttgttctgacaccccaaacaggtgcagttaaaaacgagcatttctagtcagtatgtaattcggatacagccaattaatagatgtctttctacactggagtgtgcacctgttgctctttccatcttggagaaaaataattacatacaagagactttgcttcgccctcttgaagctttatgctctttccagatttagcatggtgcccaaattggccccagcaagcaacgccttctgaaaaatggattatatcctaaaccaatgccaaagaacaaacacaaactcaggaaaatggaactattaaagaatagtgttaaaatttagtacagttgttcttttggtgttagcttacctgtcttcatctaacaataccaacttaagttttcatatagtttaggtctgtaggtttttgacttgctaatgagaattgcatactaatcttgcccagaagaaggaagtaaaccaaatattcatagaaacaaacaaacgaatgaaaattcactggctcactgaaaaggaagatttcatactgtacttgtttttaaacatgtgcctctaataatacatgttttcaaacccaaatttaaa

SEQ ID NO: 443 - DNA, 1612 bp, Homo sapiens
gggcgagtcatcgtctgacgtctggccgtgagatgtttcgggagccggggtctctccgctgcagacatgacgaagggccttgttttaggaatctattccaaagaaaaagaagatgatgtgccacagttcacaagtgcaggagagaatcttgataaattgatagctggaaagctgagagagactttgaacatatctggaccacctctgaaggcaggcaagactcgaaccttttatggtctgcatcaggacttccccagcgtggtgctagttggcctcggcaaaaaggcagccagaatcgacgaacaggaaaactggcaggaaggcaaagaaaacatcagagctgctgttgcagcaggatgcaggcagattcaagacctggagctctcttccgtggaggtggaaccctgtagagatgctcaggctgctgaggagggcgcggtgcttggtctctatgaatacgatgacctaaagcaaaaaaagaagatggctatgtcggtgaagctctatggaactggggatcaggaggcctggcagaaaggagtcctgtttgcttctgggcagaacttggcatgatggagacgccagccagcgagatgatgccaaccagatttgccgaaattattgagaagaatctcaaaagcgctagtagtaaaccgagtttcatatcagacccaggtcttggattgaggaacaggcaatgggatcattcctcagtgtggccaaaggatctgacgagccctcagtcttcttggaaattcactacataggcagccccaatgcagacaaaccaccccttgtttgttgggaaaggaattacctttgacagtggtggtatctccatcaaggcttctgcaaatatggacctcatgagggccgacatgggaggagctacaactatatgctcagccattgtgtctgctgcaaatctcagtttgcccattaatattataggtctggcccctctgtgaaaacatgcccagcggcaaggccaacaagctgggggatgttgttagagccaggaacaggaagaccatccaggttggtaacactgatgctgaggggaggctcatactggctgatgcgctctgttacgtgcacacatttaacccgaaggtcatcctcaatgccaccaccttaacaggtgtcatagatgtagctttggggtcaggtgccactggggtctttaccaattcatcctggctctggaacaagctcttcgaggccagcattgaaacaggggaccgtgtctggaggatgcctctcttcaaacattgtacaagacaggttgtagattgccagctggctgatgttaacaacattggaaaatatagatctgcgggagcatgtacatctgcggcattcctgaaagaattcgtgactcatcctaagtgggcacatttagacatagcaggtgtgatgaccaacaaagatgaggttccctatctatggaaaggcatgaccgggaggcccacaaggactctcatagagttcttacttcgtttcagtcaagacaatgcttagttcagatactcaaaaatgtcttcactctatcttaaattggacagttgaagttaaaaggtttttgaatgaatggatgaaaatattttaaagg

SEQ ID NO: 444 - DNA, 548 bp, Homo sapiens
ggttggattttttccgtggatctatcaattcacaattcgaatttggaagaaagaaggaaaacatgacgtctccagccaaattcaaaaaggataaggagatcatagcagagtacgatactcaggtcaaagagatccgtgctcagctcacagagcagatgaaatgcctggaccagcagtgtgagcttcgggtgcaactgttgcaggacctccaggacttcttccgaaagaaggcagagattgagatggactactcccgcaacctggagaagctggcagaacgcttcctggccaagacatgcagcaccaaggaccagcaattcaagaaggatcagaatgttctctctccagtcaactgctggaatctcctcttaaaccaggtgaagcgggaaagcagggaccataccaccctgagtgacatctacctgaataatatcattcctcgatttgtacaagtcagcgaggactcaggaagactctttaaaaagagtaaagaagtcggccagcagctccaagatgatttgatgaaggtcctgaacgagctctactcg

SEQ ID NO: 445 - DNA, 22 bp, Artificial Sequence
  IFIT2 Forward Primer
actgcaaccatgagtgagaaca

SEQ ID NO: 446 - DNA, 20 bp, Artificial Sequence
  IFIT2 Reverse Primer
gcctcgttttgccctttgag

SEQ ID NO: 447 - DNA, 20 bp, Artificial Sequence
  ISG15 Forward Primer
ctggtggtggacaaatgcga

SEQ ID NO: 448 - DNA, 21 bp, Artificial Sequence
  ISG15 Reverse Primer
ggcccttgttattcctcacca

SEQ ID NO: 449 - DNA, 22 bp, Artificial Sequence
  CXCL8 Forward Primer
tcttggcagccttcctgatttc

SEQ ID NO: 450 - DNA, 23 bp, Artificial Sequence
  CXCL8 Reverse Primer
ctggcatcttcactgattcttgg

SEQ ID NO: 451 - DNA, 20 bp, Artificial Sequence
  ICAM1 Forward Primer
accatctacagctttccggc

SEQ ID NO: 452 - DNA, 20 bp, Artificial Sequence
  ICAM1 Reverse Primer
tttctggccacgtccagttt

SEQ ID NO: 453 - DNA, 21 bp, Artificial Sequence
  EGR1 Forward Primer
actaccctaagctggaggaga

SEQ ID NO: 454 - DNA, 20 bp, Artificial Sequence
  EGR1 Reverse Primer
aggaaaagactctgcggtca

SEQ ID NO: 455 - DNA, 19 bp, Artificial Sequence
  IFIH1 Forward Primer
cacctacgtcctggttgct

SEQ ID NO: 456 - DNA, 23 bp, Artificial Sequence
  IFIH1 Reverse Primer
tttgatagtcggcacacttcttt

SEQ ID NO: 457 - DNA, 21 bp, Artificial Sequence
  CXCL2 Forward Primer
accgaagtcatagccacactc

SEQ ID NO: 458 - DNA, 22 bp, Artificial Sequence
  CXCL2 Reverse Primer
aaaccgaagtcatagccacact

SEQ ID NO: 459 - DNA, 24 bp, Artificial Sequence
  CFB Forward Primer
aagtcgtttcattcaagttggtgt

SEQ ID NO: 460 - DNA, 20 bp, Artificial Sequence
  CFB Reverse Primer
taattcaatcccacgcccct

SEQ ID NO: 461 - DNA, 18 bp, Artificial Sequence
  DDX58 Forward Primer
agcacttgtggacgcttt

SEQ ID NO: 462 - DNA, 25 bp, Artificial Sequence
  DDX58 Reverse Primer
ggtacaggttttggtttttcttgac

SEQ ID NO: 463 - DNA, 20 bp, Artificial Sequence
  PPP1R15A Forward Primer
gccattgtgttcgttgctct

SEQ ID NO: 464 - DNA, 18 bp, Artificial Sequence
  PPP1R15A Reverse Primer
catgtgtctgggcggctg

SEQ ID NO: 465 - DNA, 20 bp, Artificial Sequence
  CXCL5 Forward Primer
gctgcgttgcgtttgtttac

SEQ ID NO: 466 - DNA, 21 bp, Artificial Sequence
  CXCL5 Reverse Primer
ccttgtttccaccgtccaaaa

SEQ ID NO: 467 - DNA, 20 bp, Artificial Sequence
  IRAK2 Forward Primer
gaagcccggtttacctgaag

SEQ ID NO: 468 - DNA, 22 bp, Artificial Sequence
  IRAK2 Reverse Primer
tttctgtaacatcctggggagg

SEQ ID NO: 469 - DNA, 20 bp, Artificial Sequence
  2019-nCoV_N1 Forward Primer
gaccccaaaatcagcgaaat

SEQ ID NO: 470 - DNA, 24 bp, Artificial Sequence
  2019-nCoV_N1 Reverse Primer
tctggttactgccagttgaatctg

SEQ ID NO: 471 - DNA, 21 bp, Artificial Sequence
  2019-nCoV_N1 Probe
accccgcattacgtttggacc

SEQ ID NO: 472 - DNA, 20 bp, Artificial Sequence
  2019-nCoV_N2 Forward Primer
ttacaaacattggccgcaaa

SEQ ID NO: 473 - DNA, 18 bp, Artificial Sequence
  2019-nCoV_N2 Reverse Primer
gcgcgacattccgaagaa

SEQ ID NO: 474 - DNA, 23 bp, Artificial Sequence
  2019-nCoV_N2 Probe
acaatttgcccccagcgcttcag

SEQ ID NO: 475 - DNA, 22 bp, Artificial Sequence
  2019-nCoV_N3 Forward Primer
gggagccttgaatacaccaaaa

SEQ ID NO: 476 - DNA, 21 bp, Artificial Sequence
  2019-nCoV_N3 Reverse Primer
tgtagcacgattgcagcattg

SEQ ID NO: 477 - DNA, 24 bp, Artificial Sequence
  2019-nCoV_N3 Probe
aycacattggcacccgcaatcctg

SEQ ID NO: 478 - DNA, 19 bp, Artificial Sequence
  RNAse P Forward Primer
agatttggacctgcgagcg

SEQ ID NO: 479 - DNA, 20 bp, Artificial Sequence
  RNAse P Reverse Primer
gagcggctgtctccacaagt

SEQ ID NO: 480 - DNA, 23 bp, Artificial Sequence
  RNAse P Probe
ttctgacctgaaggctctgcgcg

SEQ ID NO: 481 - DNA, 30 bp, Artificial Sequence
  CALR (1F+1R)
gagtattctcccgatcccagtatctatgcc

SEQ ID NO: 482 - DNA, 30 bp, Artificial Sequence
  NCL (2F+2R)
aggaaaagacagtaagaaagagcgagatgc

SEQ ID NO: 483 - DNA, 30 bp, Artificial Sequence
  RACK1 (2F+1R)
tcccactttgttagtgatgtggttatctcc

SEQ ID NO: 484 - DNA, 20 bp, Artificial Sequence
  IFITM2 (For1/Rev1)
atagcattcgcgtactccgt

SEQ ID NO: 485 - DNA, 20 bp, Artificial Sequence
  IFI27 (For1/Rev1)
gccacggaattaacccgagc

SEQ ID NO: 486 - DNA, 21 bp, Artificial Sequence
  CD68 (For1/Rev1)
gcagcacagtggacattctcg

SEQ ID NO: 487 - DNA, 20 bp, Artificial Sequence
  OAS3 (For1/Rev1)
aaatgggagaatccccgcgt

SEQ ID NO: 488 - DNA, 20 bp, Artificial Sequence
  OAS1 (For2/Rev2)
gggtggtggagacccaaagg

SEQ ID NO: 489 - DNA, 32 bp, Artificial Sequence
  C3 (1F+1R)
caaagatcaactcacctgtaataaattcgacc

SEQ ID NO: 490 - DNA, 21 bp, Artificial Sequence
  IFIT3 (For2/Rev2)
acagcagagacacagagggca

SEQ ID NO: 491 - DNA, 20 bp, Artificial Sequence
  DDX60 (For1/Rev1)
gacaccaccggtcctgagtc

SEQ ID NO: 492 - DNA, 20 bp, Artificial Sequence
  CFB (1F+1R)
atttgtctcccctgcaccga

SEQ ID NO: 493 - DNA, 21 bp, Artificial Sequence
  IFIH1 (For2/Rev2)
acagcttcacctggtgttgga

SEQ ID NO: 494 - DNA, 31 bp, Artificial Sequence
  ZFP36 (1F+1R)
ggatctgactgccatctacgagagcctcctg

SEQ ID NO: 495 - DNA, 20 bp, Artificial Sequence
  DDX58 (For1/Rev1)
ccggaagaccctggacccta

SEQ ID NO: 496 - DNA, 30 bp, Artificial Sequence
  NFKBIA (2F+2R)
caacagagttacctaccagggctattctcc

SEQ ID NO: 497 - DNA, 20 bp, Artificial Sequence
  TNFAIP (For1/Rev1)
tgtgagcagcccctaacagg

SEQ ID NO: 498 - DNA, 20 bp, Artificial Sequence
  IFIT2 (For1/Rev1)
ccctgccgaacagctgagaa

SEQ ID NO: 499 - DNA, 20 bp, Artificial Sequence
  ICAM1 (1F+1R)
accatctacagctttccggc

SEQ ID NO: 500 - DNA, 20 bp, Artificial Sequence
  CXCL8 (2F+2R)
ccaggaagaaaccaccggaa

SEQ ID NO: 501 - DNA, 22 bp, Artificial Sequence
  IRAK2 (1F+1R)
gtggaatagtgttggccgaggt

SEQ ID NO: 502 - DNA, 31 bp, Artificial Sequence
  BIRC3 (2F+2R)
agtgcgggtttttattatgtgggtaacagtg

SEQ ID NO: 503 - DNA, 21 bp, Artificial Sequence
  CXCL10 (For2/Rev2)
tgcaagccaattttgtccacg

SEQ ID NO: 504 - DNA, 21 bp, Artificial Sequence
  OAS2 (For2/Rev2)
tgagccagttgcagaaaacca

SEQ ID NO: 505 - DNA, 21 bp, Artificial Sequence
  OAS2 (For5/Rev5)
cgttggtgttggcatcttctg

SEQ ID NO: 506 - DNA, 22 bp, Artificial Sequence
  RTP4 (For2/Rev2)
aaccttcagctagactgcctgg

SEQ ID NO: 507 - DNA, 21 bp, Artificial Sequence
  RTP4 (For4/Rev4)
tggacgctgaagttggatggc

SEQ ID NO: 508 - DNA, 21 bp, Artificial Sequence
  CMPK2 (For2/Rev2)
aggccaacagtgtgtttcgtc

SEQ ID NO: 509 - DNA, 21 bp, Artificial Sequence
  GBP1 (For2/Rev2)
gtgctagaagccagtgctcgt

SEQ ID NO: 510 - DNA, 21 bp, Artificial Sequence
  IFI44 (For1/Rev1)
ggcctgtgcagggatgacata

SEQ ID NO: 511 - DNA, 20 bp, Artificial Sequence
  IFI44L (For2/Rev2
tctgtctccaaaccgtggct

SEQ ID NO: 512 - DNA, 20 bp, Artificial Sequence
  ISG15 (For2/Rev2)
atgcgacgaacctctgagca

SEQ ID NO: 513 - DNA, 21 bp, Artificial Sequence
  ISG15 (For4/Rev4)
aggcagcgaactcatctttgc

SEQ ID NO: 514 - DNA, 20 bp, Artificial Sequence
  MxB (For3/Rev3)
catgattgtgaagtgccggg

SEQ ID NO: 515 - DNA, 19 bp, Artificial Sequence
  SERPING1 (For5/Rev5)
accagaagtttggagtccg

SEQ ID NO: 516 - DNA, 30 bp, Artificial Sequence
  CALR (1F+1R)
atttgtttctctgctgcctttgttacgccc

SEQ ID NO: 517 - DNA, 30 bp, Artificial Sequence
  NCL (2F+2R)
taccctttagatttgccattttggttctgg

SEQ ID NO: 518 - DNA, 31 bp, Artificial Sequence
  RACK1 (2F+1R)
caaatcgcctcgtggtggtgcccgttgtgag

SEQ ID NO: 519 - DNA, 21 bp, Artificial Sequence
  IFITM2 (For1/Rev1)
tgatgcctcctgatctatcgc

SEQ ID NO: 520 - DNA, 21 bp, Artificial Sequence
  IFI27 (For1/Rev1)
gccacaactcctccaatcaca

SEQ ID NO: 521 - DNA, 20 bp, Artificial Sequence
  CD68 (For1/Rev1)
ggtcactggggcaggagaaa

SEQ ID NO: 522 - DNA, 20 bp, Artificial Sequence
  OAS3 (For1/Rev1)
ccgcattgctgtagctgtgg

SEQ ID NO: 523 - DNA, 21 bp, Artificial Sequence
  OAS1 (For2/Rev2)
tcggtctcatcgtctgcactg

SEQ ID NO: 524 - DNA, 32 bp, Artificial Sequence
  C3 (1F+1R)
ttgtatgaagcaattctcctcagcacagcggc

SEQ ID NO: 525 - DNA, 24 bp, Artificial Sequence
  IFIT3 (For2/Rev2)
agctgtggaaggattttctccagg

SEQ ID NO: 526 - DNA, 20 bp, Artificial Sequence
  DDX60 (For1/Rev1)
gcctccaacctgaactggca

SEQ ID NO: 527 - DNA, 23 bp, Artificial Sequence
  CFB (1F+1R)
gccagaatcacctctgcaagtat

SEQ ID NO: 528 - DNA, 22 bp, Artificial Sequence
  IFIH1 (For2/Rev2)
atggcaaacttcttgcatggct

SEQ ID NO: 529 - DNA, 31 bp, Artificial Sequence
  ZFP36 (1F+1R)
cagtgggcgaagtgggtgagggtgacagctc

SEQ ID NO: 530 - DNA, 20 bp, Artificial Sequence
  DDX58 (For1/Rev1)
agggcatccaaaaagccacg

SEQ ID NO: 531 - DNA, 31 bp, Artificial Sequence
  NFKBIA (2F+2R)
ccaaacacacagtcatcatagggcagctcgt

SEQ ID NO: 532 - DNA, 20 bp, Artificial Sequence
  TNFAIP (For1/Rev1)
ctctgtggtacacaccggct

SEQ ID NO: 533 - DNA, 20 bp, Artificial Sequence
  IFIT2 (For1/Rev1)
agttgccgtaggctgctctc

SEQ ID NO: 534 - DNA, 20 bp, Artificial Sequence
  ICAM1 (1F+1R)
accatctacagctttccggc

SEQ ID NO: 535 - DNA, 22 bp, Artificial Sequence
  CXCL8 (2F+2R)
cttggcaaaactgcaccttcac

SEQ ID NO: 536 - DNA, 20 bp, Artificial Sequence
  IRAK2 (1F+1R)
gcggtgctgcttggaatatc

SEQ ID NO: 537 - DNA, 32 bp, Artificial Sequence
  BIRC3 (2F+2R)
ttttcatctcctgggctgtctgatgtggatag

SEQ ID NO: 538 - DNA, 20 bp, Artificial Sequence
  CXCL10 (For2/Rev2)
gcctctgtgtggtccatcct

SEQ ID NO: 539 - DNA, 21 bp, Artificial Sequence
  OAS2 (For2/Rev2)
gtgtctgcattgtcggcactt

SEQ ID NO: 540 - DNA, 19 bp, Artificial Sequence
  OAS2 (For5/Rev5)
tgcattgtcggcactttcc

SEQ ID NO: 541 - DNA, 21 bp, Artificial Sequence
  RTP4 (For2/Rev2)
gcacagaatctgcacttgggc

SEQ ID NO: 542 - DNA, 21 bp, Artificial Sequence
  RTP4 (For4/Rev4)
caacttcgctggcaggaggaa

SEQ ID NO: 543 - DNA, 21 bp, Artificial Sequence
  CMPK2 (For2/Rev2)
ggaccttttctctggaggggc

SEQ ID NO: 544 - DNA, 21 bp, Artificial Sequence
  GBP1 (For2/Rev2)
tgggcctgtcatgtggatctc

SEQ ID NO: 545 - DNA, 22 bp, Artificial Sequence
  IFI44 (For1/Rev1)
tccttcagcgatggggaatcaa

SEQ ID NO: 546 - DNA, 21 bp, Artificial Sequence
  IFI44L (For2/Rev2)
agcagcttgcgcagatgattt

SEQ ID NO: 547 - DNA, 20 bp, Artificial Sequence
  ISG15 (For2/Rev2)
ggtcagccagaacaggtcgt

SEQ ID NO: 548 - DNA, 19 bp, Artificial Sequence
  ISG15 (For4/Rev4)
acgccgatcttctgggtga

SEQ ID NO: 549 - DNA, 20 bp, Artificial Sequence
  MxB (For3/Rev3)
caacgggagcgatttttgga

SEQ ID NO: 550 - DNA, 21 bp, Artificial Sequence
  SERPING1 (For5/Rev5)
gcatttggatttgaggaggct

SEQ ID NO: 551 - DNA, 30 bp, Artificial Sequence; identical to SEQ ID NO: 481
  WTF_CALR_1F

SEQ ID NO: 552 - DNA, 30 bp, Artificial Sequence; identical to SEQ ID NO: 516
  WTF_CALR_1R

SEQ ID NO: 553 - DNA, 30 bp, Artificial Sequence; identical to SEQ ID NO: 483
  WTF_RACK1_2F

SEQ ID NO: 554 - DNA, 31 bp, Artificial Sequence; identical to SEQ ID NO: 518
  WTF_RACK1_1R

SEQ ID NO: 555 - DNA, 31 bp, Artificial Sequence
  TM_EEF2_1F
atcgaggagtcgggagagcatatcatcgcgg

SEQ ID NO: 556 - DNA, 30 bp, Artificial Sequence
  TM_EEF2_1R
acccttggtgatgtcggtgaggatgttggg

SEQ ID NO: 557 - DNA, 20 bp, Artificial Sequence
  TM_DDX58_1F
ccggaagaccctggacccta

SEQ ID NO: 558 - DNA, 20 bp, Artificial Sequence
  TM_DDX58_1R
agggcatccaaaaagccacg

SEQ ID NO: 559 - DNA, 20 bp, Artificial Sequence
  IFIT2_For1
ccctgccgaacagctgagaa

SEQ ID NO: 560 - DNA, 20 bp, Artificial Sequence
  IFIT2_Rev1
agttgccgtaggctgctctc

SEQ ID NO: 561 - DNA, 20 bp, Artificial Sequence
  TM_IFITM2_1F
atagcattcgcgtactccgt

SEQ ID NO: 562 - DNA, 21 bp, Artificial Sequence
  TM_IFITM2_1R
tgatgcctcctgatctatcgc

SEQ ID NO: 563 - DNA, 20 bp, Artificial Sequence
  MxA_For5
tagagagctgccaggctttg

SEQ ID NO: 564 - DNA, 20 bp, Artificial Sequence
  MxA_Rev5
atctgtgaaagcaagccgga

SEQ ID NO: 565 - DNA, 21 bp, Artificial Sequence
  TM_IFI6_1F
tcgctgctgtgcccatctatc

SEQ ID NO: 566 - DNA, 22 bp, Artificial Sequence
  TM_IFI6_1R
ttcttacctgcctccaccccac

SEQ ID NO: 567 - DNA, 21 bp, Artificial Sequence
  TM_IFIT3_1F
acagcagagacacagagggca

SEQ ID NO: 568 - DNA, 24 bp, Artificial Sequence
  TM_IFIT3_1R
agctgtggaaggattttctccagg

SEQ ID NO: 569 - DNA, 20 bp, Artificial Sequence
  IFI27_For1
gccacggaattaacccgagc

SEQ ID NO: 570 - DNA, 21 bp, Artificial Sequence
  IFI27_Rev1
gccacaactcctccaatcaca

SEQ ID NO: 571 - DNA, 21 bp, Artificial Sequence
  TM_IFIH1_1F
acagcttcacctggtgttgga

SEQ ID NO: 572 - DNA, 22 bp, Artificial Sequence
  TM_IFIH1_1R
atggcaaacttcttgcatggct

SEQ ID NO: 573 - DNA, 21 bp, Artificial Sequence
  TM_PARP12_1F
accatgcaaacctgcaatacc

SEQ ID NO: 574 - DNA, 19 bp, Artificial Sequence
  TM_PARP12_1R
gcagcgtgcggttaaagag

SEQ ID NO: 575 - DNA, 22 bp, Artificial Sequence
  TM_IRF9_1F
gctcttcagaaccgcctacttc

SEQ ID NO: 576 - DNA, 20 bp, Artificial Sequence
  TM_IRF9_1R
ctccagcaagtatcgggcaa

SEQ ID NO: 577 - DNA, 21 bp, Artificial Sequence
  CXCL10_For2
tgcaagccaattttgtccacg

SEQ ID NO: 578 - DNA, 20 bp, Artificial Sequence
  CXCL10_Rev2
gcctctgtgtggtccatcct

SEQ ID NO: 579 - DNA, 20 bp, Artificial Sequence
  TM_MxB_1F
catgattgtgaagtgccggg

SEQ ID NO: 580 - DNA, 20 bp, Artificial Sequence
  TM_MxB_1R
caacgggagcgatttttgga

SEQ ID NO: 581 - DNA, 21 bp, Artificial Sequence
  TM_OAS2_1F
cgttggtgttggcatcttctg

SEQ ID NO: 582 - DNA, 19 bp, Artificial Sequence
  TM_OAS2_1R
tgcattgtcggcactttcc

SEQ ID NO: 583 - DNA, 20 bp, Artificial Sequence
  TM_CXCL8_1F
ccaggaagaaaccaccggaa

SEQ ID NO: 584 - DNA, 22 bp, Artificial Sequence
  TM_CXCL8_1R
cttggcaaaactgcaccttcac

SEQ ID NO: 585 - DNA, 21 bp, Artificial Sequence
  TM_RTP4_1F
tggacgctgaagttggatggc

SEQ ID NO: 586 - DNA, 21 bp, Artificial Sequence
  TM_RTP4_1R
caacttcgctggcaggaggaa

SEQ ID NO: 587 - DNA, 25 bp, Artificial Sequence
  QY_CALR_TM1
atgaggcatacgctgaggagtttgg

SEQ ID NO: 588 - DNA, 22 bp, Artificial Sequence
  QY_RACK1_TM1
cagtttgccctctcaggctcct

SEQ ID NO: 589 - DNA, 18 bp, Artificial Sequence
  TM_EEF2_1P
acggtcagtgaagagtcg

SEQ ID NO: 590 - DNA, 20 bp, Artificial Sequence
  TM_DDX58_1P
ttagggaggaagaggtgcag

SEQ ID NO: 591 - DNA, 20 bp, Artificial Sequence
  QY_IFIT2_TM1
ctgcaaccatgagtgagaac

SEQ ID NO: 592 - DNA, 19 bp, Artificial Sequence
  TM_IFITM2_1P
tgcctccaccgccaagtgc

SEQ ID NO: 593 - DNA, 20 bp, Artificial Sequence
  QY_MXA_TM1
tacacaccgtgacggatatg

SEQ ID NO: 594 - DNA, 18 bp, Artificial Sequence
  TM_IFI6_1P
ctgctgctcttcacttgc

SEQ ID NO: 595 - DNA, 20 bp, Artificial Sequence
  TM_IFIT3_1P
tcatgagtgaggtcaccaag

SEQ ID NO: 596 - DNA, 20 bp, Artificial Sequence
  QY_IFI27_TM1
catcagcagtgaccagtgtg

SEQ ID NO: 597 - DNA, 21 bp, Artificial Sequence
  TM_IFIH1_1P
cgaagcaagccaaagctgaag

SEQ ID NO: 598 - DNA, 19 bp, Artificial Sequence
  TM_PARP12_1P
tccaggcccgaagagcatc

SEQ ID NO: 599 - DNA, 23 bp, Artificial Sequence
  TM_IRF9_1P
ctccagccatactccacagaatc

SEQ ID NO: 600 - DNA, 21 bp, Artificial Sequence
  QY_CXCL10_TM1
agcagttagcaaggaaaggtc

SEQ ID NO: 601 - DNA, 20 bp, Artificial Sequence
  TM_MxB_1P
ctgagcttggcagaggcaac

SEQ ID NO: 602 - DNA, 21 bp, Artificial Sequence
  TM_OAS2_1P
ccagtcccatccttgaagcag

SEQ ID NO: 603 - DNA, 17 bp, Artificial Sequence
  TM_CXCL8_1P
tggccgtggctctcttg

SEQ ID NO: 604 - DNA, 20 bp, Artificial Sequence
  TM_RTP4_1P
ctctctgttggtattgcttc

SEQ ID NO: 605 - DNA, 30 bp, Artificial Sequence; identical to SEQ ID NO: 481
  WTF_CALR_1F

SEQ ID NO: 606 - DNA, 30 bp, Artificial Sequence; identical to SEQ ID NO: 483
  WTF_RACK1_2F

SEQ ID NO: 607 - DNA, 31 bp, Artificial Sequence; identical to SEQ ID NO: 555
  WTF_EEF2_1F

SEQ ID NO: 608 - DNA, 29 bp, Artificial Sequence
  RPA_DDX58_1F
tgaaccgagccctgccgaacagctgagaa

SEQ ID NO: 609 - DNA, 29 bp, Artificial Sequence
  RPA_IFIT2_1F
tgaaccgagccctgccgaacagctgagaa

SEQ ID NO: 610 - DNA, 30 bp, Artificial Sequence
  RPA_IFITM2_1F
cctgggcttcatagcattcgcgtactccgt

SEQ ID NO: 611 - DNA, 30 bp, Artificial Sequence
  MxA
agtatcgtggtagagagctgccaggctttg

SEQ ID NO: 612 - DNA, 30 bp, Artificial Sequence
  RPA_IFI6_1F
accgtttactcgctgctgtgcccatctatc

SEQ ID NO: 613 - DNA, 30 bp, Artificial Sequence
  RPA_IFIT3_1F
cttttcggaacagcagagacacagagggca

SEQ ID NO: 614 - DNA, 30 bp, Artificial Sequence
  RPA_IFI27_1F
tactctctaggccacggaattaacccgagc

SEQ ID NO: 615 - DNA, 30 bp, Artificial Sequence
  RPA_IFIH1_1F
ctgggactaacagcttcacctggtgttgga

SEQ ID NO: 616 - DNA, 30 bp, Artificial Sequence
  RPA_PARP12_1F
gatgtgacgaccatgcaaacctgcaatacc

SEQ ID NO: 617 - DNA, 30 bp, Artificial Sequence
  RPA_1RF9_1F
tgcgtggagctcttcagaaccgcctacttc

SEQ ID NO: 618 - DNA, 30 bp, Artificial Sequence
  RPA_CXCL10_1F
aattattcctgcaagccaattttgtccacg

SEQ ID NO: 619 - DNA, 30 bp, Artificial Sequence
  RPA_MxB_1F
agaagggctacatgattgtgaagtgccggg

SEQ ID NO: 620 - DNA, 31 bp, Artificial Sequence
  RPA_OAS2_1F
tggaggggaccgttggtgttggcatcttctg

SEQ ID NO: 621 - DNA, 30 bp, Artificial Sequence
  RPA_CXCL8_1F
aggacaagagccaggaagaaaccaccggaa

SEQ ID NO: 622 - DNA, 30 bp, Artificial Sequence
  RPA_RTP4_1F
cgggccacatggacgctgaagttggatggc

SEQ ID NO: 623 - DNA, 30 bp, Artificial Sequence; identical to SEQ ID NO: 516
  WTF_CALR_1R

SEQ ID NO: 624 - DNA, 31 bp, Artificial Sequence; identical to SEQ ID NO: 518
  WTF_RACK1_1R

SEQ ID NO: 625 - DNA, 30 bp, Artificial Sequence; identical to SEQ ID NO: 556
  WTF_EEF2_1R

SEQ ID NO: 626 - DNA, 30 bp, Artificial Sequence
  RPA_DDX58_1R
tgcatggtctagggcatccaaaaagccacg

SEQ ID NO: 627 - DNA, 30 bp, Artificial Sequence
  RPA_IFIT2_1R
atggcattttagttgccgtaggctgctctc

SEQ ID NO: 628 - DNA, 30 bp, Artificial Sequence
  RPA_IFITM2_1R
tggcctcaatgatgcctcctgatctatcgc

SEQ ID NO: 629 - DNA, 30 bp, Artificial Sequence
  RPA_MxA_1R
ttatcgaaacatctgtgaaagcaagccgga

SEQ ID NO: 630 - DNA, 30 bp, Artificial Sequence
  RPA_IFI6_1R
agcactttttcttacctgcctccaccccac

SEQ ID NO: 631 - DNA, 32 bp, Artificial Sequence
  RPA_IFIT3_1R
ggcatttcagctgtggaaggattttctccagg

SEQ ID NO: 632 - DNA, 30 bp, Artificial Sequence
  RPA_IFI27_1R
atgggcacagccacaactcctccaatcaca

SEQ ID NO: 633 - DNA, 31 bp, Artificial Sequence
  RPA_IFIH1_1R
gcatctgcaatggcaaacttcttgcatggct

SEQ ID NO: 634 - DNA, 31 bp, Artificial Sequence
  RPA_PARP12_1R
caaagtagaaaggcagcgtgcggttaaagag

SEQ ID NO: 635 - DNA, 29 bp, Artificial Sequence
  RPA_IRF9_1R
tggagtctgctccagcaagtatcgggcaa

SEQ ID NO: 636 - DNA, 32 bp, Artificial Sequence
  RPA_CXCL10_1R
atgggagaggcagcctctgtgtggtccatcct

SEQ ID NO: 637 - DNA, 30 bp, Artificial Sequence
  RPA_MxB_1R
gtccttctaacaacgggagcgatttttgga

SEQ ID NO: 638 - DNA, 30 bp, Artificial Sequence
  RPA_OAS2_1R
ttcctggtgtctgcattgtcggcactttcc

SEQ ID NO: 639 - DNA, 30 bp, Artificial Sequence
  RPA_CXLC8_1R
tagcactccttggcaaaactgcaccttcac

SEQ ID NO: 640 - DNA, 30 bp, Artificial Sequence
  RPA_RTP4_1R
gcggaagcccaacttcgctggcaggaggaa

SEQ ID NO: 641 - DNA, 30 bp, Artificial Sequence; identical to SEQ ID NO: 612
  IFI6_1F_FITC

SEQ ID NO: 642 - DNA, 30 bp, Artificial Sequence; identical to SEQ ID NO: 630
  IFI6_1R_DIG

SEQ ID NO: 643 - DNA, 30 bp, Artificial Sequence; identical to SEQ ID NO: 617
  IRF9_1F_FITC

SEQ ID NO: 644 - DNA, 29 bp, Artificial Sequence
  IRF9_1R_DIG
tggagtctgctccagcaagtatcgggcaa

SEQ ID NO: 645 - DNA, 29 bp, Artificial Sequence
  IFIT2_1F_FITC
tgaaccgagccctgccgaacagctgagaa

SEQ ID NO: 646 - DNA, 30 bp, Artificial Sequence; identical to SEQ ID NO: 627
  IFIT2_1R_DIG

SEQ ID NO: 647 - DNA, 30 bp, Artificial Sequence; identical to SEQ ID NO: 621
  CXCL8_1F_FITC

SEQ ID NO: 648 - DNA, 30 bp, Artificial Sequence; identical to SEQ ID NO: 639
  CXCL8_1R_DIG

SEQ ID NO: 649 - DNA, 30 bp, Artificial Sequence; identical to SEQ ID NO: 611
  MxA_1F_FITC

SEQ ID NO: 650 - DNA, 30 bp, Artificial Sequence; identical to SEQ ID NO: 629
  MxA_1R_DIG

SEQ ID NO: 651 - DNA, 31 bp, Artificial Sequence; identical to SEQ ID NO: 620
  OAS2_1F_FITC

SEQ ID NO: 652 - DNA, 30 bp, Artificial Sequence; identical to SEQ ID NO: 638
  OAS2_1R_DIG

SEQ ID NO: 653 - DNA, 30 bp, Artificial Sequence; identical to SEQ ID NO: 613
  IFIT3_1F_FITC

SEQ ID NO: 654 - DNA, 32 bp, Artificial Sequence; identical to SEQ ID NO: 631
  IFIT3_1R_DIG

SEQ ID NO: 655 - DNA, 30 bp, Artificial Sequence; identical to SEQ ID NO: 483
  RACK1_2F_FITC

SEQ ID NO: 656 - DNA, 31 bp, Artificial Sequence; identical to SEQ ID NO: 518
  RACK1_1R_Biot

SEQ ID NO: 657 - DNA, 2452 bp, Homo sapiens
agaaagcgagcagccacccagctccccgccaccgccatggtccccgacaccgcctgcgttcttctgctcaccctggctgccctcggcgcgtccggacagggccagagcccgttgggctcagacctgggcccgcagatgcttcgggaactgcaggaaaccaacgcggcgctgcaggacgtgcgggagctgctgcggcagcaggtcagggagatcacgttcctgaaaaacacggtgatggagtgtgacgcgtgcgggatgcagcagtcagtacgcaccggcctacccagcgtgcggcccctgctccactgcgcgcccggcttctgcttccccggcgtggcctgcatccagacggagagcggcgcgcgctgcggcccctgccccgcgggcttcacgggcaacggctcgcactgcaccgacgtcaacgagtgcaacgcccacccctgcttcccccgagtccgctgtatcaacaccagcccggggttccgctgcgaggcttgcccgccggggtacagcggccccacccaccagggcgtggggctggctttcgccaaggccaacaagcaggtttgcacggacatcaacgagtgtgagaccgggcaacataactgcgtccccaactccgtgtgcatcaacacccggggctccttccagtgcggcccgtgccagcccggcttcgtgggcgaccaggcgtccggctgccagcggcgcgcacagcgcttctgccccgacggctcgcccagcgagtgccacgagcatgcagactgcgtcctagagcgcgatggctcgcggtcgtgcgtgtgtgccgttggctgggccggcaacgggatcctctgtggtcgcgacactgacctagacggcttcccggacgagaagctgcgctgcccggagcgccagtgccgtaaggacaactgcgtgactgtgcccaactcagggcaggaggatgtggaccgcgatggcatcggagacgcctgcgatccggatgccgacggggacggggtccccaatgaaaaggacaactgcccgctggtgcggaacccagaccagcgcaacacggacgaggacaagtggggcgatgcgtgcgacaactgccggtcccagaagaacgacgaccaaaaggacacagaccaggacggccggggcgatgcgtgcgacgacgacatcgacggcgaccggatccgcaaccaggccgacaactgccctagggtacccaactcagaccagaaggacagtgatggcgatggtataggggatgcctgtgacaactgtccccagaagagcaacccggatcaggcggatgtggaccacgactttgtgggagatgcttgtgacagcgatcaagaccaggatggagacggacatcaggactctcgggacaactgtcccacggtgcctaacagtgcccaggaggactcagaccacgatggccagggtgatgcctgcgacgacgacgacgacaatgacggagtccctgacagtcgggacaactgccgcctggtgcctaaccccggccaggaggacgcggacagggacggcgtgggcgacgtgtgccaggacgactttgatgcagacaaggtggtagacaagatcgacgtgtgtccggagaacgctgaagtcacgctcaccgacttcagggccttccagacagtcgtgctggacccggagggtgacgcgcagattgaccccaactgggtggtgctcaaccagggaagggagatcgtgcagacaatgaacagcgacccaggcctggctgtgggttacactgccttcaatggcgtggacttcgagggcacgttccatgtgaacacggtcacggatgacgactatgcgggcttcatctttggctaccaggacagctccagcttctacgtggtcatgtggaagcagatggagcaaacgtattggcaggcgaaccccttccgtgctgtggccgagcctggcatccaactcaaggctgtgaagtcttccacaggccccggggaacagctgcggaacgctctgtggcatacaggagacacagagtcccaggtgcggctgctgtggaaggacccgcgaaacgtgggttggaaggacaagaagtcctatcgttggttcctgcagcaccggccccaagtgggctacatcagggtgcgattctatgagggccctgagctggtggccgacagcaacgtggtcttggacacaaccatgcggggtggccgcctgggggtcttctgcttctcccaggagaacatcatctgggccaacctgcgttaccgctgcaatgacaccatcccagaggactatgagacccatcagctgcggcaagcctagggaccagggtgaggacccgccggatgacagccaccctcaccgcggctggatgggggctctgcacccagccccaaggggtggccgtcctgagggggaagtgagaagggctcagagaggacaaaataaagtgtgtgtgcaggga

SEQ ID NO: 658 - DNA, 5218 bp, Homo sapiens
gactctggagtgggagtgggagcgagcgcttctgcgactccagttgtgagagccgcaagggcatgggaattgacgccactcaccgacccccagtctcaatctcaacgctgtgaggaaacctcgactttgccaggtccccaagggcagcggggctcggcgagcgaggcacccttctccgtccccatcccaatccaagcgctcctggcactgacgacgccaagagactcgagtgggagttaaagcttccagtgagggcagcaggtgtccaggccgggcctgcgggttcctgttgacgtcttgccctaggcaaaggtcccagttccttctcggagccggctgtcccgcgccactggaaaccgcacctccccgcagcatgggcaccagcctcagcccgaacgacccttggccgctaaacccgctgtccatccagcagaccacgctcctgctactcctgtcggtgctggccactgtgcatgtgggccagcggctgctgaggcaacggaggcggcagctccggtccgcgcccccgggcccgtttgcgtggccactgatcggaaacgcggcggcggtgggccaggcggctcacctctcgttcgctcgcctggcgcggcgctacggcgacgttttccagatccgcctgggcagctgccccatagtggtgctgaatggcgagcgcgccatccaccaggccctggtgcagcagggctcggccttcgccgaccggccggccttcgcctccttccgtgtggtgtccggcggccgcagcatggctttcggccactactcggagcactggaaggtgcagcggcgcgcagcccacagcatgatgcgcaacttcttcacgcgccagccgcgcagccgccaagtcctcgagggccacgtgctgagcgaggcgcgcgagctggtggcgctgctggtgcgcggcagcgcggacggcgccttcctcgacccgaggccgctgaccgtcgtggccgtggccaacgtcatgagtgccgtgtgtttcggctgccgctacagccacgacgaccccgagttccgtgagctgctcagccacaacgaagagttcgggcgcacggtgggcgcgggcagcctggtggacgtgatgccctggctgcagtacttccccaacccggtgcgcaccgttttccgcgaattcgagcagctcaaccgcaacttcagcaacttcatcctggacaagttcttgaggcactgcgaaagccttcggcccggggccgccccccgcgacatgatggacgcctttatcctctctgcggaaaagaaggcggccggggactcgcacggtggtggcgcgcggctggatttggagaacgtaccggccactatcactgacatcttcggcgccagccaggacaccctgtccaccgcgctgcagtggctgctcctcctcttcaccaggtatcctgatgtgcagactcgagtgcaggcagaattggatcaggtcgtggggagggaccgtctgccttgtatgggtgaccagcccaacctgccctatgtcctggccttcctttatgaagccatgcgcttctccagctttgtgcctgtcactattcctcatgccaccactgccaacacctctgtcttgggctaccacattcccaaggacactgtggtttttgtcaaccagtggtctgtgaatcatgacccactgaagtggcctaacccggagaactttgatccagctcgattcttggacaaggatggcctcatcaacaaggacctgaccagcagagtgatgattttttcagtgggcaaaaggcggtgcattggcgaagaactttctaagatgcagctttttctcttcatctccatcctggctcaccagtgcgatttcagggccaacccaaatgagcctgcgaaaatgaatttcagttatggtctaaccattaaacccaagtcatttaaagtcaatgtcactctcagagagtccatggagctccttgatagtgctgtccaaaatttacaagccaaggaaacttgccaataagaagcaagaggcaagctgaaattttagaaatattcacatcttcggagatgaggagtaaaattcagtttttttccagttcctcttttgtgctgcttctcaattagcgtttaaggtgagcataaatcaactgtccatcaggtgaggtgtgctccatacccagcggttcttcatgagtagtgggctatgcaggagcttctgggagatttttttgagtcaaagacttaaagggcccaatgaattattatatacatactgcatcttggttatttctgaaggtagcattctttggagttaaaatgcacatatagacacatacacccaaacacttacaccaaactactgaatgaagcagtattttggtaaccaggccatttttggtgggaatccaagattggtctcccatatgcagaaatagacaaaaagtatattaaacaaagtttcagagtatattgttgaagagacagagacaagtaatttcagtgtaaagtgtgtgattgaaggtgataagggaaaagataaagaccagaaattcccttttcaccttttcaggaaaataacttagactctagtatttatgggtggatttatccttttgccttctggtatacttccttacttttaaggataaatcataaagtcagttgctcaaaaagaaatcaatagttgaattagtgagtatagtggggttccatgagttatcatgaattttaaagtatgcattattaaattgtaaaactccaaggtgatgttgtacctcttttgcttgccaaagtacagaatttgaattatcagcaaagaaaaaaaaaaaagccagccaagctttaaattatgtgaccataatgtactgatttcagtaagtctcataggttaaaaaaaaaagtcaccaaatagtgtgaaatatattacttaactgtccgtaagcagtatattagtattatcttgttcaggaaaaggttgaataatatatgccttgtataatattgaaaattgaaaagtacaactaacgcaaccaagtgtgctaaaaatgagcttgattaaatcaaccacctatttttgacatggaaatgaagcagggtttcttttcttcactcaaattttggcgaatctcaaaattagatcctaagatgtgttcttatttttataacatctttattgaaattctatttataatacagaatcttgttttgaaaataacctaattaatatattaaaattccaaattcatggcatgcttaaattttaactaaattttaaagccattctgattattgagttccagttgaagttagtggaaatctgaacattctcctgtggaaggcagagaaatctaagctgtgtctgcccaatgaataatggaaaatgccatgaattacctggatgttctttttacgaggtgacaagagttggggacagaactcccattacaactgaccaagtttctcttctagatgattttttgaaagttaacattaatgcctgctttttggaaagtcagaatcagaagatagtcttggaagctgtttggaaaagacagtggagatgaggtcagttgtgttttttaagatggcaattactttggtagctgggaaagcataaagctcaaatgaaatgtatgcattcacatttagaaaagtgaattgaagtttcaagttttaaagttcattgcaattaaacttccaaagaaagttctacagtgtcctaagtgctaagtgcttattacattttattaagctttttggaatctttgtaccaaaattttaaaaaagggagtttttgatagttgtgtgtatgtgtgtgtggggtggggggatggtaagagaaaagagagaaacactgaaaagaaggaaagatggttaaacattttcccactcattctgaattaattaatttggagcacaaaattcaaagcatggacatttagaagaaagatgtttggcgtagcagagttaaatctcaaataggctattaaaaaagtctacaacatagcagatctgttttgtggtttggaatattaaaaaacttcatgtaattttattttaaaatttcatagctgtacttcttgaatataaaaaatcatgccagtatttttaaaggcattagagtcaactacacaaagcaggcttgcccagtacatttaaattttttggcacttgccattccaaaatattatgccccaccaaggctgagacagtgaatttgggctgctgtagcctatttttttagattgagaaatgtgtagctgcaaaaataatcatgaaccaatctggatgcctcattatgtcaaccaggtccagatgtgctataatctgtttttacgtatgtaggcccagtcgtcatcagatgcttgcggcaaaaggaaagctgtgtttatatggaagaaagtaaggtgcttggagtttacctggcttatttaatatgcttataacctagttaaagaaaggaaaagaaaacaaaaaacgaatgaaaataactgaatttggaggctggagtaatcagattactgctttaatcagaaaccctcattgtgtttctaccggagagagaatgtatttgctgacaaccattaaagtcagaagttttactccaggttattgcaataaagtataatgtttattaaatgcttcatttgtatgtcaaagctttgactctataagcaaattgcttttttccaaaacaaaaagatgtctcaggtttgttttgtgaattttctaaaagctttcatgtcccagaacttagcctttacctgtgaagtgttactacagccttaatattttcctagtagatctatattagatcaaatagttgcatagcagtatatgttaatttgtgtgtttttagctgtgacacaactgtgtgattaaaaggtatactttagtagacatttataactcaaggataccttcttatttaatcttttcttatttttgtactttatcatgaatgcttttagtgtgtgcataatagctacagtgcatagttgtagacaaagtacattctggggaaacaacatttatatgtagcctttactgtttgatataccaaattaaaaaaaaattgtatctcattacttatactgggacaccattaccaaaataataaaaatcactttcataatcttgttatgaagttttatgttgtagcaaatatagtctaatgtatcactttatttcaactattactatggattattcaattaaaatattgcactgtaaa

SEQ ID NO: 659 - DNA, 4276 bp, Homo sapiens
acattcaacctctgccaccatggggaactgggctgtgaatgaggggctctccatttttgtcattctggtttggctggggttgaacgtcttcctctttgtctggtattaccgggtttatgatattccacctaagttcttttacacaagaaaacttcttgggtcagcactggcactggccagggcccctgcagcctgcctgaatttcaactgcatgctgattctcttgccagtctgtcgaaatctgctgtccttcctcaggggttccagtgcgtgctgctcaacaagagttcgaagacaactggacaggaatctcacctttcataaaatggtggcatggatgattgcacttcactctgcgattcacaccattgcacatctatttaatgtggaatggtgtgtgaatgcccgagtcaataattctgatccttattcagtagcactctctgaacttggagacaggcaaaatgaaagttatctcaattttgctcgaaagagaataaagaaccctgaaggaggcctgtacctggctgtgaccctgttggcaggcatcactggagttgtcatcacgctgtgcctcatattaattatcacttcctccaccaaaaccatccggaggtcttactttgaagtcttttggtacacacatcatctctttgtgatcttcttcattggccttgccatccatggagctgaacgaattgtacgtgggcagaccgcagagagtttggctgtgcataatataacagtttgtgaacaaaaaatctcagaatggggaaaaataaaggaatgcccaatccctcagtttgctggaaaccctcctatgacttggaaatggatagtgggtcccatgtttctgtatctctgtgagaggttggtgcggttttggcgatctcaacagaaggtggtcatcaccaaggtggtcactcaccctttcaaaaccatcgagctacagatgaagaagaaggggttcaaaatggaagtgggacaatacatttttgtcaagtgcccaaaggtgtccaagctggagtggcacccttttacactgacatccgcccctgaggaagacttctttagtatccatatccgcatcgttggggactggacagaggggctgttcaatgcttgtggctgtgataagcaggagtttcaagatgcgtggaaactacctaagatagcggttgatgggccctttggcactgccagtgaagatgtgttcagctatgaggtggtgatgttagtgggagcagggattggggtcacacccttcgcatccattctcaagtcagtctggtacaaatattgcaataacgccaccaatctgaagctcaaaaagatctacttctactggctgtgccgggacacacatgcctttgagtggtttgcagatctgctgcaactgctggagagccagatgcaggaaaggaacaatgccggcttcctcagctacaacatctacctcactggctgggatgagtctcaggccaatcactttgctgtgcaccatgatgaggagaaagatgtgatcacaggcctgaaacaaaagactttgtatggacggcccaactgggataatgaattcaagacaattgcaagtcaacaccctaataccagaataggagttttcctctgtggacctgaagccttggctgaaaccctgagtaaacaaagcatctccaactctgagtctggccctcggggagtgcatttcattttcaacaaggaaaacttctaacttgtctcttccatgaggaaataaatgtgggttgtgctgccaaatgctcaaataatgctaattgataatataaataccccctgcttaaaaatggacaaaaagaaactataatgtaatggttttcccttaaaggaatgtcaaagattgtttgatagtgataagttacatttatgtggagctctatggttttgagagcacttttacaaacattatttcatttttttcctctcagtaatgtcagtggaagttagggaaaagattcttggactcaattttagaatcaaaagggaaaggatcaaaaggttcagtaacttccctaagattatgaaactgtgaccagatctagcccatcttactccaggtttgatactctttccacaatactgagctgcctcagaatcctcaaaatcagtttttatattccccaaaagaagaaggaaaccaaggagtagctatatatttctactttgtgtcatttttgccatcattattatcatactgaaggaaattttccagatcattaggacataatacatgttgagagtgtctcaacacttattagtgacagtattgacatctgagcatactccagtttactaatacagcagggtaactgggccagatgttctttctacagaagaatattggattgattggagttaatgtaatactcatcatttaccactgtgcttggcagagagcggatactcaagtaagttttgttaaatgaatgaatgaatttagaaccacacaatgccaagatagaattaatttaaagccttaaacaaaatttatctaaagaaataacttctattactgtcatagaccaaaggaatctgattctccctagggtcaagaacaggctaaggatactaaccaataggattgcctgaagggttctgcacattcttatttgaagcatgaaaaaagagggttggaggtggagaattaacctcctgccatgactctggctcatctagtcctgctccttgtgctataaaataaatgcagactaatttcctgcccaaagtggtcttctccagctagcccttatgaatattgaacttaggaattgtgacaaatatgtatctgatatggtcatttgttttaaataacacccaccccttattttccgtaaatacacacacaaaatggatcgcatctgtgtgactaatggtttatttgtattatatcatcatcatcatcctaaaattaacaacccagaaacaaaaatctctatacagagatcaaattcacactcaatagtatgttctgaatatatgttcaagagagagtctctaaatcactgttagtgtggccaagagcagggttttctttttgttcttagaactgctcccatttctgggaactaaaaccagttttatttgccccaccccttggagccacaaatgtttagaactcttcaacttcggtaatgaggaagaaggagaaagagctgggggaagggcagaagactggtttaggaggaaaaggaaataaggagaaaagagaatgggagagtgagagaaaataaaaaaggcaaaagggagagagaggggaagggggtctcatattggtcattccctgccccagatttcttaaagtttgatatgtatagaatataattgaaggaggtatacacatattgatgttgttttgattatctatggtattgaatcttttaaaatctggtcacaaattttgatgctgagggggattattcaagggactaggatgaactaaataagaactcagttgttctttgtcatactactattcctttcgtctcccagaatcctcagggcactgagggtaggtctgacaaataaggcctgctgtgcgaatatagcctttctgaaatgtaccaggatggtttctgcttagagacacttaggtccagcctgttcacactgcacctcaggtatcaattcatctattcaacagatatttattgtgttattactatgagtcaggctctgtttattgtttcaattctttacaccaaagtatgaactggagagggtacctcagttataaggagtctgagaatattggccctttctaacctatgtgcataattaaaaccagcttcatttgttgctccgagagtgtttctccaaggttttctatcttcaaaaccaactaagttatgaaagtagagagatctgccctgtgttatccagttatgagataaaaaatgaatataagagtgcttgtcattataaaagtttccttttttattctctcaagccaccagctgccagccaccagcagccagctgccagcctagctttttttttttttttttttttttagcacttagtatttagcatttattaacaggtactctaagaatgatgaagcattgtttttaatcttaagactatgaaggtttttcttagttcttctgcttttgcaattgtgtttgtgaaatttgaatacttgcaggctttgtatgtgaataattctagcgggggacctgggagataattcctacggggaattcttaaaactgtgctcaactattaaaatgaatgagctttc

SEQ ID NO: 660 - DNA, 3696 bp, Homo sapiens
actcccctgcaggcgcggctggggcgaaagcctgcgagctgagcgggcgcaaggtcctccgcgcctcctttaagaaccggcccagcccggcccgcgcccccagagcgtacggcatccgcgtggcgggagggcgcgactttctccggtcccgggcgggacggggacggcggcgggacaacttgggaaacttctctggggcggacggcagggaccccgggcaccggtggaggaggatgtaggagggcggctgctggtcctgggtgttcccgacctcctaggccccgctcgtccaggccatggggctccagcgccctcggcgccgcccgaggggcgacgctcttgtctagccgagccgggcagcgctgtcgtccacggtgcgcactgggcgggcagcgctccctctgcccacctcccgccccgtcatggaccaccaggacccctactccgtgcaggccacagcggccatagcggcggccatcaccttcctcattctctttaccatcttcggcaacgctctggtcatcctggctgtgttgaccagccgctcgctgcgcgcccctcagaacctgttcctggtgtcgctggccgccgccgacatcctggtggccacgctcatcatccctttctcgctggccaacgagctgctgggctactggtacttccggcgcacgtggtgcgaggtgtacctggcgctcgacgtgctcttctgcacctcgtccatcgtgcacctgtgcgccatcagcctggaccgctactgggccgtgagccgcgcgctggagtacaactccaagcgcaccccgcgccgcatcaagtgcatcatcctcactgtgtggctcatcgccgccgtcatctcgctgccgcccctcatctacaagggcgaccagggcccccagccgcgcgggcgcccccagtgcaagctcaaccaggaggcctggtacatcctggcctccagcatcggatctttctttgctccttgcctcatcatgatccttgtctacctgcgcatctacctgatcgccaaacgcagcaaccgcagaggtcccagggccaagggggggcctgggcagggtgagtccaagcagccccgacccgaccatggtggggctttggcctcagccaaactgccagccctggcctctgtggcttctgccagagaggtcaacggacactcgaagtccactggggagaaggaggagggggagacccctgaagatactgggacccgggccttgccacccagttgggctgcccttcccaactcaggccagggccagaaggagggtgtttgtggggcatctccagaggatgaagctgaagaggaggaagaggaggaggaggaggaggaagagtgtgaaccccaggcagtgccagtgtctccggcctcagcttgcagccccccgctgcagcagccacagggctcccgggtgctggccaccctacgtggccaggtgctcctgggcaggggcgtgggtgctataggtgggcagtggtggcgtcgacgggcgcagctgacccgggagaagcgcttcaccttcgtgctggctgtggtcattggcgtttttgtgctctgctggttccccttcttcttcagctacagcctgggagccatctgcccgaagcactgcaaggtgccccatggcctcttccagttcttcttctggatcggctactgcaacagctcactgaaccctgttatctacaccatcttcaaccaggacttccgccgtgccttccggaggatcctgtgccgcccgtggacccagacggcctggtgagcccgcctgcgctgcccctgtggggttggtgcggtggcgccggggtcaccctgcttcttgccctgctgtgtgtggctgcctcccctgggctttctgctccctgcccagatcctgtaggcctcatcttaggaaccccttgggaggggtgggcaggggggctgctagcaagggtcccagtgaagcttccccttgccggcttagctgtgggggaccccttctccaccctctccctgagcacaggccgatggaggtggttcaaatcctctggaacatagccaagaccaggagaagagagagcactttcttcccagagccccatgctctccagaccaatgtctgggcttccctttcttgaggaccttgtgttcctggcaggtcacttgcttgtggtgttttcgtttctttttcatctcccccccacccacaaagagcacggagccagccttccacttttcccagtggggcctgctgctgagggggaggaagaaacgaagactgatcacccacgctaggcactcgcggtccctggcaggcgctgggatgggggcttatggggtggcatcgtctctgggccctcctttccccctttgcctgttttcggatctgtggttcctttgaaagccagaacaatggatcggcttccttacccagcacccctccggtaggtgggtggccacgtggatgcctcgctggggcggtcttggaggcctggtctctgcctcgacgggagatccccgatcactggcattcaccccctgcaaaaatcggggcgacaatagctcactgcctacttgctgcagggagatgaaaggctttgcagaaagctttgagctctgtgggggaacacactagagaaccaaaaatgtgattatatggtgatataaaaatccctttcctctgtgtttaccaccacctgtcttcctgtagacttttgttctgtccctggggtgtgtgaattcctaccccgaactggaagccgggagtggcagacagaatcactatttcaagttaaaggatctctttgagaatgtgttcttctggctgcaaaggtctgagttattacgctacatgacaacgtttcgacatttcaccggcaacaccaagagggtttttagtggcttgggtctccccagtgggggataagtcttttgtcatcaaggaggcaaattgtctccccaagacagctcaaaatatccacacctcggcaacagtctaagatgagagcctgtgacaggtggcagcgcccccaggtggggtactggcatcagagcctggtgcgcccctaggggagcctcccactggagtgcccggccaggtctccaagccccaaatgagtccttgtgaaccacaactgatccccccaggtgggtgcttgtggactgcctcggacccagccacgctgctccccgcaatgctgatggggctgtgcattgaggacccctgcttcctggttctcagtcccaccccaaaacctggcacccagaacagttggaagtgtggaaaggaggtttatcggccttcccttggagagggcctggcttcaacattgggccagtaggcatcttagcttggcaggtgtcgggggaatgggccagatggacctgctagatttggaagggcaccgagggagttttctgggtgtagagagaatggaggggaccaaaaagagtccttcctggggtgtgggaggcttcccagcttggtcctcagtgggttgttgaggccagagtatcgccctgggatgtggtggggagctgggccaggagagggactgactgtgaccctctgctggccggtcttgtgtgcgccccatgggacccccagtgttcttgcctgtgacctcttattgcgacatgcaggtggtgttttttttttttttaaactctgagctattttatcaataaaggatattttgtaataa

SEQ ID NO: 661 - DNA, 5427 bp, Homo sapiens
agaaggtagcagacagacagacggatctaacctctcttggatcctccagccatgaggctgctctgggggctgatctgggcatccagcttcttcaccttatctctgcagaagcccaggttgctcttgttctctccttctgtggttcatctgggggtccccctatcggtgggggtgcagctccaggatgtgccccgaggacaggtagtgaaaggatcagtgttcctgagaaacccatctcgtaataatgtcccctgctccccaaaggtggacttcacccttagctcagaaagagacttcgcactcctcagtctccaggtgcccttgaaagatgcgaagagctgtggcctccatcaactcctcagaggccctgaggtccagctggtggcccattcgccatggctaaaggactctctgtccagaacgacaaacatccagggtatcaacctgctcttctcctctcgccgggggcacctctttttgcagacggaccagcccatttacaaccctggccagcgggttcggtaccgggtctttgctctggatcagaagatgcgcccgagcactgacaccatcacagtcatggtggagaactctcacggcctccgcgtgcggaagaaggaggtgtacatgccctcgtccatcttccaggatgactttgtgatcccagacatctcagagccagggacctggaagatctcagcccgattctcagatggcctggaatccaacagcagcacccagtttgaggtgaagaaatatgtccttcccaactttgaggtgaagatcacccctggaaagccctacatcctgacggtgccaggccatcttgatgaaatgcagttagacatccaggccaggtacatctatgggaagccagtgcagggggtggcatatgtgcgctttgggctcctagatgaggatggtaagaagactttctttcgggggctggagagtcagaccaagctggtgaatggacagagccacatttccctctcaaaggcagagttccaggacgccctggagaagctgaatatgggcattactgacctccaggggctgcgcctctacgttgctgcagccatcattgagtctccaggtggggagatggaggaggcagagctcacatcctggtattttgtgtcatctcccttctccttggatcttagcaagaccaagcgacaccttgtgcctggggcccccttcctgctgcaggccttggtccgtgagatgtcaggctccccagcttctggcattcctgtcaaagtttctgccacggtgtcttctcctgggtctgttcctgaagtccaggacattcagcaaaacacagacgggagcggccaagtcagcattccaataattatccctcagaccatctcagagctgcagctctcagtatctgcaggctccccacatccagcgatagccaggctcactgtggcagccccaccttcaggaggccccgggtttctgtctattgagcggccggattctcgacctcctcgtgttggggacactctgaacctgaacttgcgagccgtgggcagtggggccaccttttctcattactactacatgatcctatcccgagggcagatcgtgttcatgaatcgagagcccaagaggaccctgacctcggtctcggtgtttgtggaccatcacctggcaccctccttctactttgtggccttctactaccatggagaccacccagtggccaactccctgcgagtggatgtccaggctggggcctgcgagggcaagctggagctcagcgtggacggtgccaagcagtaccggaacggggagtccgtgaagctccacttagaaaccgactccctagccctggtggcgctgggagccttggacacagctctgtatgctgcaggcagcaagtcccacaagcccctcaacatgggcaaggtctttgaagctatgaacagctatgacctcggctgtggtcctgggggtggggacagtgcccttcaggtgttccaggcagcgggcctggccttttctgatggagaccagtggaccttatccagaaagagactaagctgtcccaaggagaagacaacccggaaaaagagaaacgtgaacttccaaaaggcgattaatgagaaattgggtcagtatgcttccccgacagccaagcgctgctgccaggatggggtgacacgtctgcccatgatgcgttcctgcgagcagcgggcagcccgcgtgcagcagccggactgccgggagcccttcctgtcctgctgccaatttgctgagagtctgcgcaagaagagcagggacaagggccaggcgggcctccaacgagccctggagatcctgcaggaggaggacctgattgatgaggatgacattcccgtgcgcagcttcttcccagagaactggctctggagagtggaaacagtggaccgctttcaaatattgacactgtggctccccgactctctgaccacgtgggagatccatggcctgagcctgtccaaaaccaaaggcctatgtgtggccaccccagtccagctccgggtgttccgcgagttccacctgcacctccgcctgcccatgtctgtccgccgctttgagcagctggagctgcggcctgtcctctataactacctggataaaaacctgactgtgagcgtccacgtgtccccagtggaggggctgtgcctggctgggggcggagggctggcccagcaggtgctggtgcctgcgggctctgcccggcctgttgccttctctgtggtgcccacggcagccaccgctgtgtctctgaaggtggtggctcgagggtccttcgaattccctgtgggagatgcggtgtccaaggttctgcagattgagaaggaaggggccatccatagagaggagctggtctatgaactcaaccccttggaccaccgaggccggaccttggaaatacctggcaactctgatcccaatatgatccctgatggggactttaacagctacgtcagggttacagcctcagatccattggacactttaggctctgagggggccttgtcaccaggaggcgtggcctccctcttgaggcttcctcgaggctgtggggagcaaaccatgatctacttggctccgacactggctgcttcccgctacctggacaagacagagcagtggagcacactgcctcccgagaccaaggaccacgccgtggatctgatccagaaaggctacatgcggatccagcagtttcggaaggcggatggttcctatgcggcttggttgtcacggggcagcagcacctggctcacagcctttgtgttgaaggtcctgagtttggcccaggagcaggtaggaggctcgcctgagaaactgcaggagacatctaactggcttctgtcccagcagcaggctgacggctcgttccaggacctctctccagtgatacataggagcatgcaggggggtttggtgggcaatgatgagactgtggcactcacagcctttgtgaccatcgcccttcatcatgggctggccgtcttccaggatgagggtgcagagccattgaagcagagagtggaagcctccatctcaaaggcaagctcatttttgggggagaaagcaagtgctgggctcctgggtgcccacgcagctgccatcacggcctatgccctgacactgaccaaggcccctgcggacctgcggggtgttgcccacaacaacctcatggcaatggcccaggagactggagataacctgtactggggctcagtcactggttctcagagcaatgccgtgtcgcccaccccggctcctcgcaacccatccgaccccatgccccaggccccagccctgtggattgaaaccacagcctacgccctgctgcacctcctgcttcacgagggcaaagcagagatggcagaccaggctgcggcctggctcacccgtcagggcagcttccaagggggattccgcagtacccaagacacggtgattgccctggatgccctgtctgcctactggattgcctcccacaccactgaggagaggggtctcaatgtgactctcagctccacaggccggaatgggttcaagtcccacgcgctgcagctgaacaaccgccagattcgcggcctggaggaggagctgcagttttccttgggcagcaagatcaatgtgaaggtgggaggaaacagcaaaggaaccctgaaggtccttcgtacctacaatgtcctggacatgaagaacacgacctgccaggacctacagatagaagtgacagtcaaaggccacgtcgagtacacgatggaagcaaacgaggactatgaggactatgagtacgatgagcttccagccaaggatgacccagatgcccctctgcagcccgtgacacccctgcagctgtttgagggtcggaggaaccgccgcaggagggaggcgcccaaggtggtggaggagcaggagtccagggtgcactacaccgtgtgcatctggcggaacggcaaggtggggctgtctggcatggccatcgcggacgtcaccctcctgagtggattccacgccctgcgtgctgacctggagaagctgacctccctctctgaccgttacgtgagtcactttgagaccgaggggccccacgtcctgctgtattttgactcggtccccacctcccgggagtgcgtgggctttgaggctgtgcaggaagtgccggtggggctggtgcagccggccagcgcaaccctgtacgactactacaaccccgagcgcagatgttctgtgttttacggggcaccaagtaagagcagactcttggccaccttgtgttctgctgaagtctgccagtgtgctgaggggaagtgccctcgccagcgtcgcgccctggagcggggtctgcaggacgaggatggctacaggatgaagtttgcctgctactacccccgtgtggagtacggcttccaggttaaggttctccgagaagacagcagagctgctttccgcctctttgagaccaagatcacccaagtcctgcacttcaccaaggatgtcaaggccgctgctaatcagatgcgcaacttcctggttcgagcctcctgccgccttcgcttggaacctgggaaagaatatttgatcatgggtctggatggggccacctatgacctcgagggacacccccagtacctgctggactcgaatagctggatcgaggagatgccctctgaacgcctgtgccggagcacccgccagcgggcagcctgtgcccagctcaacgacttcctccaggagtatggcactcaggggtgccaggtgtgagggctgccctcccacctccgctgggaggaacctgaacctgggaaccatgaagctggaagcactgctgtgtccgctttcatgaacacagcctgggaccagggcatattaaaggcttttggcagcaaagtgtcagtgttggca

SEQ ID NO: 662 - DNA, 3980 bp, Homo sapiens
gtggcagcgccgggcggcggcggggaccctggctgggagcgcggcggtgccggcgggaggccgagcggggctcgacagagcaggatcgagatgaccacagccacccctctgggggataccaccttcttctcactgaacatgaccaccaggggagaagacttcctgtataagagttctggagccattgttgctgccgttgtggtggttgtcatcatcatcttcaccgtggttctgatcctgctgaagatgtacaacaggaaaatgaggacgaggcgggaactagagcccaagggccccaagccaaccgccccttctgccgtgggcccaaacagcaacggcagccaacacccagcaactgtgaccttcagtcctgttgacgtccaggtggagacgcgatgacctctaccctggcgctatctccaccactgtccaaagagcctctccagagtcaagacccagaggcacactctctggcagcttcacaatgagcttcttctggtcaggtcgacagagacatctttgacgcaatctctgatgcttccagcaatcctcaaccttgtctgccctgccctaccccaactgtgtccacatccctgccgccaccccaccaaaaagctgcagaacattcttttgtcatctgatgaggtagagctatgttgggaatccaccaatgtgggcttggctttcccccacactgtagttagacagatagacagatagcccaggagccaggtgtcagggagcactgctgagagtatcacaataggatctgtcacggggttcatatcagatgaagcgccgtatccactgcttcacagagcaaaacattcaatcccataaccaggcacaggggaactaacttggactaactaaccagaaaaccttgttaacgtataacttgttccagtactacatctctgcctgctggctcatgacaattgctcagcacattttcccctcttgaagaaaggttgcaagaagaactaaattatcctcaaaagatttctgcttcattagtaaagagtcagtgatggaatagggtgactctgcagaatagtggcctctagggtaggagcttgttgtgttgtccgtgggcctggaatgatcctggtggctgatcagggtccttctcccactctgggctgtatcaaccctgacggtcttggtctttggctcccctttatctggattctgagcacgctgactgtcctgttaatgccttccctccaaggaccagtatttggagattaattagattacaactctatctatgttacctttgtccttcctggtcaccttgcagattcaagacatgttcaaagcaacacattcacaacccatttctattctatagcaacctcgtctgtgactccttagcctggagaacaatctaccaagaagagaaagtatctggaattaagaagtcctaccatccaagccctacttcctggttgtgtggccttggaaaagtgactcaacctctttatattcagtttcctaaccatgaagtggaaatgataacacctgcctcattggggcactataacaagtgaaggacttaggaaaacatctggagtatagcgcctggcacccaggagatgcttaataaatgggaaccaggattctttttcttttcttttttcttttcttttttttttttttttgagacagagcctcaatctgtcacctgggctggagtgcagtggcacgctcacagctcgctgcagccttgaactcctgggctcaagggatgctccctcctcagcctccagagtagctgggactacaggtatgtgtcacctcaccaggctaatttttttattttttatttttgtagagatggggtctcgctgtgttgcccaggctggtcttgaacccctggcctcaagtgatccttctgctttggcctcccaaagtgctgggattacaggcatggactatggtgcccagcctaggagccaacattattattattataggcttttttttcaattgcaagatagacatttcttcacattttaatgattctgaaatcagaacatatcttgcaattgatgggttcattaatataattgtagttctttacttcctctcaaaaacttgtgatcttataattgatggcatcttggaaacaaggtaataaatctctattctgttaaagaaagtgacacactttgacatttaacctcaaattttaggagtctctccctcttggggtcagaaatcccttctgaggccaggtgtcgtggctcatgcctgtaatcccagcactttgggaggctgaggcaggcgggtcacttgaggtcaggagtttgagaccagcctggccaacatggcaaaaccctgtctctactaataatacaaaatttagctgggcatggtggcatgcacctgtaatcccactactagggaggctgtggcatgagaatcacttgaacctggaaggcagaggttgcagtgagccaagatcgtgccactgcactccagcctgggcaacagagtgaaactgcatctcaaaaaaagaaaaatccattatgaggggaaatcaagagtcagggaggtaagaggtcttacccagggtcacacagctcatgatatcccactgtaaaaatactctgtggaatagctctggagaaatactggcacattcttcctctctggtcattatttcttcctactgtgtttaaatatccaccaagtgtcaaggactttgtaagatgctttcacataaattatctcataggattaaattttcccaaaaacctggggaggaattattttttccaaaacagatgataatttctgattcaaagagaaagaaaacaaagtacttttccaaagtcacacagctagtaagtcacaaagacaagactcaaaaccaggtctcttgactccaaagtctgtcttttttgtgaagtcacactcctctgctggcccagctcaaagcagcacagattctttatgggctgaacaaggggagtacgggtttgtccatgtgtttgagtagagatcagggttctggcttccaggctgaaggtgagggaaaagccacttctaactcctttgggcatccatgctcacggccaaaagagccccttctcaacacatccaagtgctaaggattcctgcttcattcaagctactacttaggcccaaggagcaaggggtagaatggcatctaaccagagcaaagccatttctttgagggctcaagccataaacaaatatgctcccctaaacatattcggcttgaaaaagttgttttggggcagctgtggtggtgcacccctgtaatcccagccctttgggagtcagaggcagtcagtcacttgagcccaggagttcaagactagcctgggcaacacggcgaaacctcgtctctacaaaaaatacaaaaattaaccaagcgtggtagtgcacgcctgtattcccagctacttgggaggctgaggtaggaggatggcttgagcctgggaggcagaggttgcagtgagctgagatcgcgccactgcactccagccggggtgacagagccagaccctgtctcaaagcatatttcaaccctaaaactagactcttctgcccacagtgcagtcttctaagggttaccctctggtatatgttcttttgctaaatgaaggcttggagttggagggaagaaggggagatggagtggtgagggcgagtcaaataaaaggatttgagtgtctcgtttttgactaatgaagatgattcaataaacatcctgtaagaagggttcctatgtgcaagttgaggtgctactaagtacattaagacacaattgctgctctcaaggagttagcagctggtctcatgcagggatctcaccacgtggttatgtattttgtttctgatgaggtgcctttcttagcagatgctgccttatttggccactgaaacaatcaaagctaataaatgcttaaagaaaaatatctgacaataaaaaggtttaaatcaaa

SEQ ID NO: 663 - DNA, 15942 bp, Homo sapiens
agtttttggggtccccgtgctgctgcaaggcgaaacgggagggagtgacccctgcgcccctcagtcccccctacgacgtcgcctccatagtctgcggagaagcggagactgcgcgcctcgcctcacagcgaaacgccgcgcactcggagccggcacggctcggcgggttgtggttttttgcactgaatgtaacctagactcatcttcacgggcttgtgttgccccaggtactgtcaaaggcagtatttttgtgtttctgcagagttttgcacaaaatctgttcccatgcaaaccaatgagggagaagtatcggaagaaagcagttccaaggtggaacaggaggattttgtaatggaagggcatggcaagactccacctcctggtgaagaaagcaaacaagagaaggagcaagaaagggaagaacagttaatggaagacaagaaaaggaagaaagaggataaaaagaaaaaagaagccactcagaaggtcacggaacaaaaaaccaaagtgcccgaagtgacgaaaccaagtttaagccaaccaacggccgccagcccaattggcagctctccatcgccaccagtcaatggtggcaacaatgccaaaagggtggcagtgccgaacggacaaccgccaagcgccgcccgctacatgcctcgggaggtgccgccgcgattccgttgccagcaggaccacaaagtgttactaaaacgtgggcagccccctccaccgtcctgcatgctccttgggggtggggcagggcctcctccctgcacagcacctggagcaaacccaaacaacgcacaagtgacaggagcgctgctgcagagtgagagtgggactgcgccagtctggagcaaaagcacaccacctgctccagataatggtacttccgcttggggtgagccaaatgaaagcagtcctgggtggggcgagatggatgatacaggagcatcgaccacaggctgggggaacacgcccgccaacgctcccaatgccatgaagcctaattccaaatctatgcaagacggctggggggagagtgacgggccagtcacaggagctcgccatcccagctgggaagaggaggaggatggaggagtctggaacaccactggctctcagggcagtgcttcctcccacaactcagcaagctggggacaaggaggaaagaaacaaatgaagtgctcactcaaaggaggaaacaatgattcatggatgaatcctcttgccaaacagttttcaaatatgggattgctgagtcagactgaagataatccaagcagcaaaatggatttgtctgtaggaagcctttcagataaaaaatttgatgtggacaagcgagcgatgaatctcggggattttaatgatatcatgaggaaggatcgatctgggttccgtccacctaattccaaagacatgggaaccacagatagtgggccttattttgagaagggcggtagtcatggtttgtttggaaacagcacagcacaatcgagaggtctgcacacacccgtgcagccactaaattcttctcccagtctccgggcgcaagtgcctccccagtttatttccccccaggtttctgcctcaatgctcaagcagtttcccaacagtggcctgagtccaggtcttttcaatgtggggccccagttatctcctcaacaaattgccatgctgagccagcttccacaaattccccagtttcagttggcatgtcagcttctcttgcagcagcagcaacagcagcagttgttacagaaccagagaaagatttctcaagctgtacgccaacagcaagagcagcagctggctcgaatggtgagtgcactgcagcagcagcagcagcagcagcagaggcagccaggcatgaagcactcgccctctcatcctgttgggcccaagccgcatctggacaacatggtacccaacgcattgaatgtggggctcccagaccttcaaaccaaagggccaatacctggatatggttctggcttcagctctggcggcatggactatggcatggttggtgggaaggaggctggaaccgagtctcgctttaaacagtggacctccatgatggaggggctgccctctgtagccacacaggaagccaatatgcacaaaaatggcgctatagtggcccctggtaaaacccggggagggtcaccgtacaaccagtttgatatcatccctggtgacacactgggtggccatacgggtcctgctggtgatagctggttacctgccaaatctccaccaacaaataaaatcggaagtaaatccagcaatgccagttggcctccagaattccaaccaggagtgccatggaaaggtatccaaaacattgaccctgaatctgacccctatgtcaccccaggaagtgtgctggggggtacagccacatctcccattgtagatactgaccaccaactgctgcgggataacaccacagggtctaattcttccctcaacacctcgctgccttcacctggtgcctggccctacagtgcctctgacaactcctttaccaacgttcatagcacttcagcaaagttccctgattacaaatcaacatggtccccagatcccataggacacaaccccactcatctctccaacaagatgtggaaaaaccatatttcctccaggaacactacaccgctgccccgcccacctcctggtctgaccaaccccaaaccatcatctccctggagcagcacagcaccccgatcagtcagggggtgggggacacaggactcacggctcgcctcggcctctacctggagtgatggtggctcagttcgtcctagttactggctggttcttcacaatctcaccccacagattgatgggtcaaccttgagaacgatctgcatgcagcatggcccactgctgacattccatctgaatctaacccagggcactgccctgatccgatacagcaccaaacaggaggcggccaaggcccaaactgcactgcacatgtgtgtgttgggaaacactaccatccttgctgagtttgccactgatgatgaagtcagccgctttctggcacaagctcagccccctacacctgcagcaaccccaagtgcgccagctgcggggtggcagtcgctggagaccggccagaaccagtcagatcccgtgggacctgctctgaatctttttggtgggtccactgggctcgggcagtggagcagcagcgctggtggcagcagcggggccgatcttgctggcgcttcattgtgggggcccccaaactattcttctagcttatggggagtcccaacggtggaagatccccataggatgggcagccctgctcctttactacctggtgaccttctgggaggagggtcggattcaatctgaacttagaactttcaactctgacctcgtgaccttttttggaacagcagcagcactaacttgaccttttcgttttttttttcaacttgcaataaatacatttttaaaaggaaaaaagaaaacggagagaaaaaaaggtgggtcattgacagactgtctgagcacatagttgcctcccttataacttcagttttttcgtttggaatatgaatccaaaaagagaacatatcactcttgaaatacttgaatcatgaacgccaacctagaaagacaatgtgaagcaagtacacataccatttaaatttaaacacaaaaaaattaaaaaaattagtttctagtttttcacttttttcatgttatatggaagttgttgctaagaaacatatatactgaaaaaaaatagctttttaactttgtttgcactgggtgtgtttccgtccttaggtctaccatgtttgggagggagggaaattcaaaagaattgttgggggaggggggagggaagacttgacggagcctcactttaaaaacaaaaacacaaaaaacctaaaaaaaaaaaaaaggaaaaaatttgtgattggctggttgataaataccagtgtgttctggcacatgtaactgcccaggcatgctcgttctggtgtgtgtgtgcacgtgtgttcatgtgcattcgcgtgcatccttctctgtctctgtgtgtgtgcctgtgttcttcccttctcccctgccccaccctgacttctcagaaagctgcatcgctgacagtctgcaggctggctggccggcccatctgctttttattttatttttttaactatgagaacacacaggcccggagagccactgctactaaagcaactccattgggctgcattaagatgaacagagtgctttttaatgatgaaagcagggagctcctttccatttgcaacttagcctgaatgtggggtttctctggctgttcttttgacctagcagtagagtggagcactgccaagtccaaaaaactagagcaggaggtacctcttggagcaacggtgtgtttatttctgtttttttttttttttaagtgaatggccaccaggcacatctgagtatctgttaagtttcatgcaggccttttcgttagtttgaaatgggaacggaagataacttttgatgatgcgatgtctcaaaaacagagaaactttgttccctctttccttatgatcaggtttgagaaattcttcaaaaaattaggtgaagttgagttacatatttctgttggttggttctctttttcattttatgaaaacagaaaagaataagtggtgagcagcctcctgaaagcatctgcagctactccctctgctcctttctcgccgagcgttacctgtgccaggccgtggcgcgttacagcaccaggccatcactgacagaaacgtttacttaacgaatgttcttaaaccagtgtgtacttcaagcgtttccttttgtttctctgtgttgtgtatttcctgtgtatgtggttttgcttaggcaggtataacttagcgaagacttttaagtattgcacctttttttgatttttgacctcttccccccaccttgtaattttgcttttttaatttcggtatttaaatacttttttttttttttaagcatcaatgtagtagtactctgggccgaacaggggtcaacgtttaatctacagttatcaccaacatgtatgtacttatgtcggaatcaaaatgtatcaaactgcttattgtgaagagaattatagcagacctgaagggggcgaaaaaccagatagggtggggggatggatgccggtgacgtgctagcacttgtgtggacatcccagtctgcattatgctgtttaacataaagtgccgacattttgtaccagcaaatacctgcccattccaacccttggtgggagcagacctctactgtcctctgtaacttgctgctattgaggacaagggagtttttctttctttagcgtcttcagtgaaggatacaatacaacaatgcctaatgtatttgactttttagcttgtgtctgtgtgtaggtgggtgggtgggtgtgtataggaaaagcctaaaacaagttatttgcatttcagtggttttgtgagacaaagaatgggaaattctgtagcccttctggcttaccctgttgattataaacctagcctcaaaagagattgacaggcatgactcaagtgagtgttcacatatacaagcctgcatgagccctctgtgggtaggtggtcacacttggcatctgcagcattgacgtggccccgctgggtgccttgagcatgccctcttcctgctctgcaatttgaatcaccaccgtgccccttccaccactgttccccatgcaaaagctctgcttccagcagcccccactgaccgctctctgtgtggagcaaagtgctgtcgtgcggtgaccaccaggtgaagagcagcttgtattcagacatctagagaaggttaaatcttagtgtccctgggccaggagcatatcccaaggctcctgcgagccagtggcgaccctgtccactgccgctcttggttcactgctgtgtcctgccccaccctcctctcctcctgcctgttggttccttgacctgcactatgggttagttgagttccttacgatactacggtgaaagccgggtgctagagcccctcttgtttacaagacataatgagggatttgaaatatgtaaaaataaacatgagaagctaaaatgttcttccatcataagcttaaagggaaaaaaactaaaaactttaaaaaaaaaagaccaaaaagtgcgtatatatatacatataaatatatattttagatgaagactaactctgggagcatttaacagtgttttttgtttctgtttttaacatttgttttcctgctttaaaatttgcaagcattctcaggaattctagggtaggaagccagttttttgaagatggtttatttaaccatatcttatcctagagagatggctgtttctttcctgttaataaacttttacaagttcctgaaacttcagaaagtttaaacaatttttacttaaaaaaatgtaaaaagaaaagtctccaaacattattgtcatactggggatcacacattttaaaacacatagaaatattttttaaaaattatcaatttagcagcaacaggtaaattcattatcttaaaaatatgggagaaggattaagctttgtaagagctcgatcatggattcttttgaaattgtgtgtagtttaatgggagagtgtttggtgtatatagatgagaatgccatcactttgttcctttccatttgagactgaactgaaatctcccctagtaatttttatttttttaaaggaacccttctccttgtccccacaaccccagcaacaaaagaaaggaaggaaggaagaaacaacagcttaaaaaaaaaagtaatctgtaaaatagtacagttggattgctgagaatctatgtaaagagttaggaaatataggttaataatttttggaacaaattttaaatataggcattactagaggaaaattatctatggactgtcctattaatgaagaatgtctgtcttacctccgtttgttttgggaggaggagaaaatatagaagaatctaataaggaacaagtgattttacttttttagctcccagctactgttgtgctcgttttaattgctgttttgaagatctgctgcttaattatccccatcccttagccggagatgtggagtgtttcctttcagtttttggtgatgttgaattcttttgtattccctcctggggccaggggtcagaattcccaagcatgaccacagcttcttttaaacattaagcttcccagtgggaaggaaactccagctcgacaggtaaagggagtgggtggggttgctgcctgcaatttctctaaaaccgctttagtgccttcgtacatacacccagacatcctgagcaagggggacgcacatgtgtgtgtgtgtggtccagtcactccacagatgtaagatactcacccataaaggaaattggagtggttctggacaggccccaaaggcagtgggctgaatttaaaataaataaacaaacgtcaagcaagttaatatgcttatgtctcagtaatgtagaatgccaagttccttcctgtgtcgtgtgccctccattactgtgcattgattcctccaggtgtgtaattgtgacaactgcagtgatttggaaagtctctttgtcttgggcaaatagaaggggttcctgttgttctgctcttgtccttcgtctcctccccttttcccccagacctcccccttctttttgtcaacttgctgggagctttgctttattggttggcagtgacctaagaacaggatatggtgaggatgtcatggaagagaagagctctttccgtggtattctttggcaagagccatgtctactaagaggttagatgacttcagtatacttataaaattcagtgagagtgccttcttctcttctaccacactctggcatagatacaggcttgctggtcacctctcattacatagatttattttaaaaacattttgattatgttaatttgagctttcccttttttttttttaactactttttaaaacacttgattactagtggcttagaggtgtgtacatctcctgaacatcacaaacttggtttctacctaccacacgagtagccaaaagaaaagaagcactaatagagaaaggggtgtctcacaccagacagaggacctctgctgtcaattagatccagtatcatgacctaactttaagtgtggaaaagagttcagatctctgagacactgtgaagaaatggatggctcatgtaacatctctgatccctcagtccccaaccctggacgtgtttcatttacaacattcataggagttaacttagcagtgttgcaagttaaggttccaaaccaaattatttaatcagtgtccccccaataaatcacttatccatttattgctagttagttttatttatagcaacttgatttcctatgagtatggctcctgttgtaagaattttcccacctcttctgacatgaatgtagcataagttagcaatcggttcttccaaactcctgtgggttgaatatggtatagaaggtatgcaagaggaaaaagaaaggaaaagataaaactcctgcctgagaatttggaagcacctttattaacacatatatctcgcagaaactagaagctcataggctgttaactttttgcaactattcactcatttttaccacttttttttttgggtgagggggtgatttttgtaaggttaacagccagattccattttgacctcagatgctgtgtactttttaatttcattttttatattctgccatcttgactcttctctaaaacagaatgaaaatgtctgcatgctgagcaaaatgcttacgccaagcctgtttttctctgcagagtaaacaggatgttttcagcagacttggctctaatagccatctctaagattagggaacaattgagtctttatgtagaaaagatccattttttccccatcctcagagttaaaattcaacatttaaagctttatcggttattgttttagatttgagatttttgtttttaagtatctataagatctttagaagtgagataaatttttcgctggttaaaaaaaatcaaactttcctctgcagtgtttttgccaagttttgtcacacttcatgtgtatgcattaactatacttcttagtgttactgcaaaaaaaaaaaacaaaaacaaaacaaaaaaaagccttgttctttaattgtgtttttcctcctgtgagtggacaactaaagccgcgtgatgatgcggatgaaaatattctggtctgtgtgtatacaatgaattgtcagtcttcagacctcatggtcgttaagaaaatagggaactcacaaaccctgctgcgcactacatttacttctttatctgcaagtacagggagtccatacagtcaagaaacacacagatacacataatgctattgaggacattgtcattctgtaagaaaacagaatattatctagatttccagagttagtgcagaccctgtgataacagtctgtgggtttgtggccagcgccaaaggtgtgtgtattttcagaaatggtccctatttgtcagtgatagtgttttttttttcttaagtttgacaaagggggtggtaatatcacattctttagatttgaaataattatcagctccaagaatctgtgaacatagtaataacaataaaaattcaacatcgaccctccctaacctgctcaccatacctccccaccccatgcctctgaagaaagaggccatgaacctacgaggtggtaaagggggacacaggtcagggagtggagagctactcctccagcagctcagcacccacactgcccgcatgcgtgtggccaccgggaccagatcccgagtgattgtggcatacccctaatatttgagtagtttttaagctgtcagtctcttgtcataacctcctaccgccacccaaaaaagtaacgaaagttgcagtaactgccagtgtttgcctcaccaaatttaaatcgttcccttttcagttagctatatacctgaatttgtttttaacaagaaactgtacatggccaggaaaaatggtactaccttggccaaagggtctttgcaaaaagctcagtcttcagttcttcactgtgacaaatgcttatcttgttcatgggaggggaaagatcagataaataggcaagaagtactctgttttaaataaagaataaatagtgtccgtttaaagcactttgtgcctcaacttcatttttaaactgtaaatcattgctttggaaataaattcccaattataattgacccatatctagccaatatcaacaagttgggatggtttttgtttttttcttttttttcaaaaagggaaattcctctttactgctcacagtaagctgcaaaagaaagttgtcaaggtggcttatgatgctgttgtagcagagctgtgaaaggaagtgctttgctttctctcccgccttccggaatctggcgttccttccccttcggctactgaaaggtgtgtacaactcccagaggggtggctgtaaaagttgactggaggcaaagtggagtggccttattgccaggactagccctacagaagagctttacagagaggaggacagtacatcctatgtgtgttcgccaaaaatgggaaaggtgggtatttaggcaaaacaaaataaaaacctttggaaccctttaagaagttacataccttttaaaggtagtatagtttctcaccaagtgatgcattttagcatgacacttcttgccagaaattttgggataagttggaataaatgtgtttaaaacatcatccaccgccctttttaaattttgtctaaggaattacttaagtatagtatttctgaatgtgcctttgtgagtacagagaccgtccgttctaggaagaagctatccgttggatacaaacaaacagacggtcagctttagtcattagggaagtcaaagttcctcctggaagtcccaggagcagctgttgagatttcattagcatcaatattgcacagtgtagagttgagtggaagagattctgggacttgggagaggagacaggggaaggtacccaggcgacgcagacccacgttagtccaagagcgcaggtttacacatctgcattccctagttttctccgtctgtatgtttgtgctcatgtggctttggctgttttgttttttgtttttctgtaagcactggagaattggaatatggtgatacttgtgacacattcatgcatgtaaacaaggcattttccagcttctgccgtgtgcagagcgggcagcacgcttttaccctttgagtctgtgtcctgaggcggccattacattcccacatgggcgtcacatcacgttgctgttgatgcaaacagggtattacacacaaggaaaaggggttttgaagagttaagattgaagtgtttgagaaagaaaagagaaaaatctgaaatcatattttatttcttcagagctattatagttgaacacagaaatctgcagtgtctttatttgtttttatgttttaaacaatttcacctcttctccccactcctatcttctaaagaaatatcaagcaaatgctaagggccatttccatgattcctcagagctcccccaaagaggagaacagtccctcccactcgattccttcagcttcattcaggaagacacagggaggagagatgctgcttctgcgctttgctctcattcctctctcatggccttgaaatgtattattatgcaaatgtgaattttgatactgaatttaagaagaggttgttggatttttttttttttttttttttttttcaaaaaaaaaagtcccacatgtggtcatcgtcgcttctttatgttgtaaggtgaattgtaactatgcattctgcaaagggggtggggaggagagggcagaaaggggaagggagtagcgttgcatccttgttcttcagtttctgtgtccatggtgtccccgtgtcctggaggggaaggggagtgagagacgaatgtggtaaggtcagcacagtgagatagagacctctgagtcctcttgccactgttgctggcaggtctgatggccaggtaaattccagggggcctgcagttcctgtcaaccaatgtggttcaggattcttgatcctagccgtgcagtgttaatccagtgcagcaatggaactccacaggctccagtgttctctggaaaaagtactcatcctttcctgaattcagagcccttcaagctcaggaaaccacgcttcactcgtgctgacctgaaagttaatctttaggtcgattttgaaaaactccgcctcctctctcctttttaatatttctttcttcctttttaatcatgtttaagtgaacttactcttagttataaggaactgtcctgctttgtggggaagagggctgttgcttgtcaggcaaaaaagttttctcttcctacccaccatccctctctctgcttcccttgcatttggcaggctgtatgaagccaatgagctgcgaggtgttttgacaggggaggtctgcatgcagcctcttctttgtcctaacaattcctttgttgatcttgcctgtgatgaatcatagcgcctgcattgctctggtctaggcattatttgcaacacacagtatcgtaagcgagagattgttctgcctatattcagtgttttccatgcagcaattcttcttgttgacgttcacagtactgtaacgagtaacagacttgatcacagtctcctcgtgcctgtgcagggctgcacaggcatgatcttatcagggttccaatctgttagattgcctttaaacaaaaaaaacaacaaaaaaataaaatcctgacgtttcaactgtctcacacaaaataatacctcgaggtacatttccccctgcaatgtaaacccttaactcctctctcctttctgacatcagtggattatcctttttaaaatatgaacatgtaaatagcaggataactttaaaaaacattttctttgctgtgaaagtaaccctaaaatatgttttcttcttttgtatttttttggtttttgtttttaagccatcagaagtttcagatctttactctttcatgtttaagaagaaagagcagaggaggtcgggggagccggtttgcatttgtgttggaggggtgttatctccattgcctcccacacagtgacagcagaccagtatgtaaaccctgtcttggctgggcgcggtggctcacaccagtaatcccagcactttgggaggctgaggcaggcagatcatctgaggtcaggagtttaagaccagcctggccaacatggtgaaaccccgtctctactaaaaaattagccggacgcagtggcgcgcgcctgtggtcccagctgctcgggaggctaaggcaggagaattgcttgaacccgggagacggaggttgcggtgagccgagattgcaccactgcactccagtgtgggcaacagagcaagacttcgactcaaaaacataaaataaacaaaagacacacacacacacaaaaaccctgtcttaaatagctgccatctcttccagcaatctagtgccagggtaagaagtgtctgaatttctctcttccagcagatccatcccctgcagggactccagaatgttctccacacaatacctggagctctcaacctttcttggttcagacacacacatacacaccccttgagtaactcagtatcattttgtagttcacagaaggatgtagtccctggcattttggtttgcactgtagaatccatagccttgtcactttgttatgctctggaaatgtactgatttcttacttgggaggaaacttgtgtaaggagatgtgcaaaccaccctgaaagccatgtgcatcctcacctcttccattaccccctccatgagctcgaagcgacattaagtagagggaaatgcttttaacaaatgctgctcatgtggatctgtcagctattgcttgcctagatttgggcacccatgaagcagggttggaatggatcattttgaattgcttctttgcagacacccccttcgcccccatctttaagataaaccctttactagtcaagaagcccttttcagttggatctcactgatcttgtatagtgacgacttcctttgaaggaagaagcttgattataagtgcatgcatattatccacccaccttctgatttgggcactgttcaccttggaattttatttattttgtttatctggaggccctttttctatcagtctctgatccctcatgggttctgcctgcccttgtatctcttgtacaatgctcccaaagggctttgctgatctctgcacttctttcctgggacactccccccaccaccaccctttgcacacaccagtgaccaaagtgtatgcagtgatctcacagaagacatcaaaaatggtgcatgcaccgtgaatgtgctcacagagacacgtgcacaagattctgcacccttggccttaatctcagtatgacttaaggtgcaggaacatttttaacaggttttaaaaaaacaaaaaacccttctgggaggaaaaaaataaaaagcagatacaacagctcaactgttcccactcctaactctccactatgtgcttataacttcacattctatgccctccccgccacccacctcatccctgttctgcgtaaccaaaaaacagacaacaaaagcaacctgaggagaggtttctggactattttatctgtctccatttagatggagatataaatgctgctttgggttccataatcctagggggctatgtttacatagtaaaatacatcctaccaaatcaggaaacagtgaataatgggagtcacttcacagagacgcaggaggacctggggggcgtagcagaggaggataggtagagaagtaccattttaattatttgtgacttgtggcttccttcctcctctcctcctccctccacgtctctctttgccccctttagacagaaggtgcagaaaagggcatcaaaaagaggctggattttttaaaaggcagctttccaactttgcacacaaacaggtaacaggaaggtacagcaaaaatcctctcatctgaaacactgtcagcagaaacaaaacctgtaaaaatgactaatcagctgcacatattgatgctctctgcaagttacctttaagtgttttttttttcttatacttgaagttgcttttacgatattattttggtggctttcttttctctctttgatgggcaatagaggaagtagataatgggatttaaggacgcctgggggagaaaagggaggatgtggcattgtctttttttttttttttttttttttttttagcatagaggtttaatcaaactcccatatgttgaaattgctcctcatattactggttttacatggacacagaaactaggcactttagaggtgcacttgcatggcaggctgggcccccttttctatattttattttcctttttagtatagtggtacttaaaatcactggttcacttaaaaaaacaaacaataaaatgttaaactctactaatgtacaaataagctgaaaagttgcattttatgtgtattttttgccatagcaggtactgtatttctcatgctggatttcaaaaaaaaaaaaaaaagtatcaaaaacaaaaaaaactaaagggtggtgttttattggattgtgacaggttgagtaataaggaattaagtcgtcgtcatttcattaaaactgagagatgatgtaatgcatatataagagttttctgaagggttttttttgggcttttaaacagcttatttttgtttttgtttagtttttttattttattttattttggaaagatatgattgtattatgtgcaactcagttgcttacattataactacaaaatatttttgggttcctggaaaaaaaagaaaaaagactaataaatgtgtttggctgctaagca

SEQ ID NO: 664 - DNA, 7609 bp, Homo sapiens
agtggtttgtttgcgctgtggatggagtggcggtgcggtcccctgtggagcgcaaacaaggcgcttggttggcgcgggcgcctggctgccttcctcgtggtggggccttcggagcaatcgtcctggttctggcgatggttgagacgcctcgattgcggcgtgtaacgaacaccttccaccatgaccacctcagcaagttcccacttaaataaaggcatcaagcaggtgtacatgtccctgcctcagggtgagaaagtccaggccatgtatatctggatcgatggtactggagaaggactgcgctgcaagacccggaccctggacagtgagcccaagtgtgtggaagagttgcctgagtggaatttcgatggctctagtactttacagtctgagggttccaacagtgacatgtatctcgtgcctgctgccatgtttcgggaccccttccgtaaggaccctaacaagctggtgttatgtgaagttttcaagtacaatcgaaggcctgcagagaccaatttgaggcacacctgtaaacggataatggacatggtgagcaaccagcacccctggtttggcatggagcaggagtataccctcatggggacagatgggcacccctttggttggccttccaacggcttcccagggccccagggtccatattactgtggtgtgggagcagacagagcctatggcagggacatcgtggaggcccattaccgggcctgcttgtatgctggagtcaagattgcggggactaatgccgaggtcatgcctgcccagtgggaatttcagattggaccttgtgaaggaatcagcatgggagatcatctctgggtggcccgtttcatcttgcatcgtgtgtgtgaagactttggagtgatagcaacctttgatcctaagcccattcctgggaactggaatggtgcaggctgccataccaacttcagcaccaaggccatgcgggaggagaatggtctgaagtacatcgaggaggccattgagaaactaagcaagcggcaccagtaccacatccgtgcctatgatcccaagggaggcctggacaatgcccgacgtctaactggattccatgaaacctccaacatcaacgacttttctgctggtgtagccaatcgtagcgccagcatacgcattccccggactgttggccaggagaagaagggttactttgaagatcgtcgcccctctgccaactgcgaccccttttcggtgacagaagccctcatccgcacgtgtcttctcaatgaaaccggcgatgagcccttccagtacaaaaattaagtggactagacctccagctgttgagcccctcctagttcttcatcccactccaactcttccccctctcccagttgtcccgattgtaactcaaagggtggaatatcaaggtcgtttttttcattccatgtgcccagttaatcttgctttctttgtttggctgggatagaggggtcaagttattaatttcttcacacctaccctcctttttttccctatcactgaagctttttagtgcattagtggggaggagggtggggagacataaccactgcttccatttaatggggtgcacctgtccaataggcgtagctatccggacagagcacgtttgcagaagggggtctcttcttccaggtagctgaaaggggaagacctgacgtactctggttaggttaggacttgccctcgtggtggaaacttttcttaaaaagttataaccaacttttctattaaaagtgggaattaggagagaaggtaggggttgggaatcagagagaatggctttggtctcttgcttgtgggactagcctggcttgggactaaatgccctgctctgaacacgaagcttagtataaactgatggatatccctaccttgaaagaagaaaaggttcttactgcttggtccttgatttatcacacaaagcagaatagtatttttatatttaaatgtaaagacaaaaaactatatgtatggttttgtggattatgtgtgttttgctaaaggaaaaaaccatccaggtcacggggcaccaaatttgagacaaatagtcggattagaaataaagcatctcattttgagtagagagcaagggaagtggttcttagatggtgatctgggattaggccctcaagacccttttgggtttctgccctgcccaccctctggagaaggtgggcactggattagttaacagacaacacgttactagcagtcacttgatctccgtggctttggtttaaaagacacacttgtccacataggtttagagataagagttggctggtcaacttgagcatgttactgacagagggggtattggggttattttctggtaggaatagcatgtcactaaagcaggccttttgatattaaattttttaaaaagcaaaattatagaagtttagattttaatcaaatttgtagggtttctaggtaatttttacagaattgcttgtttgcttcaactgtctcctacctctgctcttggaggagatggggacagggctggagtcaaaacacttgtaattttgtatcttgatgtctttgttaagactgctgaagaattattttttttcttttataataaggaataaaccccacctttattccttcatttcatctaccattttctggttcttgtgttggctgtggcaggccagctgtggttttcttttgccatgacaacttctaattgccatgtacagtatgttcaaagtcaaataactcctcattgtaaacaaactgtgtaactgcccaaagcagcacttataaatcagcctaacataagatctctctgatgtgtttgtgattctttcaaatccctatgtgccattatatttctttatttcctaaaacaggcaaaataagctcaagtttatgtactctgagtttttaaaacactggagtgatgttgctgaccagccgtttcctgtacctctctaagttgggtatttgggacttaagggattaagtttttcacctagacttagttacacacaatcttggcatttcctagcctagaggtttgtagcagggtacaagccccactcctcccccttcctttgctcccctgagtttggttttggcttaccataacattgttttgaccattcctagcctaatacaatagcctaacataatgtaagattaactggctttacgatttctattctctgctctcagtgataagaaacaaatattagctaccctgctaccctggttgaagccttccaaggctggctatgccctaggcatgggctcatccttgggtgtatcttgccttgcaggaagaccagtggaccgattgtgattctcaaaagctctgtgttgtcacctgtgcccttgccccttgctcttatcttggtccgtgtatctgggagttcttccaccttatcttggccaattcctaccttcgttcattcctcatgaggttgggtaaaagctccctccggctcccatgatgctgtgcatatacctagcaaaaagcaattattggacacattggagtgcaatattattaatagcattaatactactaataatgtgggcaatagtgattgtttttaaaaggcagtatactcttaccagtgcgaggtagctggggcctgtgatagtttttagagataagttcttcaggcaactgtgtattttacactagtcaagtaatcctagatatccgtggtttttcttaagaaagttggctcgtaatatgatttaatattcaaagtagagtcatctacctattagcttgctggcgtggtcctagtttatgcctgtttcagcatgattgttgagtaccctgtttcatccttagcattttcttgattttgttgttaaatgatgtatacccttatttccattgaatctgtgcttccacccccccaactgaagttgtcttccctttgcttggccacccttacagcctcttggatggtgtatcctacagtgtaagcactaaactgaagaggcagtgacctgagcactttggattttgttcattgtaatcaattccatgacaaaatgattgcatgagaaggaattttaaattcataggatcagaatttaggtgaaaacaaccagcatatttgtttcttcaccctctcacctagaattagctttgacctacaggtcacagtgcaatccccttgtatttctaaggtgttttttatagttcatttgcagacaatgggttatgtgataacttttatcagtgatagattaaacagaataatgaccaagctttcaaccttaaggagtcaggccagtatttacaaaaggaggtctccatgaactccttaaatatgagttcccctaatatcatcttgccaggtactaaataacaactgatagcacaagctatagggaatttgaaagaattccatggatgggtgttgtctagggccttttgttgtttttgagacggggtctgactctcacccaggctggagtatagtgtggcgcaatcttggctcactgcaacttctgcctcccagattcaagcgattctcctgcctcagcctcccaagtagctgagactacaggtgtgcaccaccatgctcagctaatttttgtatttttagtacagatggggtttcaccatgttggccaggctggtcttgaactcctgatctcccaaagtgaggtcttgaactggtcttgaactcctccacctcccaaagtgctgggattacaggcgtgagccactgcacccggcctagggccatgtaaaaagccagatctgtgctgctgtctgtgtagaagggtagacaagtggatgagaagttcctgaactattcttggcccttttaccactaagtgaaagtaacttgctgccccaaagaaagatgtctcatcattcgacaggactttctagttgaacttcatgaaagcaagagatcctgtttttcttgctcaccactgtatcttgagacctgttgtagtgcctgcaatacttatttaataagttatttttaagtatcagttttgtgagctttaactctatgaggtctttgttgtttgactgtattttaactctggccatgacagcaagacaaagttccatttttattgagcttaaaaagaatcaaggccaggtgaagtggcttacgcctgtgatcccaacactttgtgaggctgcagcaggaggatctcttgagcccaggagtttgagaccgttctaggcaatgtagtgaggtccagactccacaaaataatttttttttaaattgcacgcctgtagtctcagctatcaggaggctgagatgggaggatgacttgagcccaggaaattgaagctgcagtgaattgtgattgcaccactgcactccagcctgggtgacagatcaagaccttgcctaaacaaaacaaaacaaacaaaaccccaaaaaacaaattgaaaatgttgattctttttactacaaacattatggcagcactaaaaacttcgtgggagtgtactgtggaaaatagtgtacttaattaattctcattgtaatcaggctaccaagagccttgtgttgctttaagagttataactgccaggcacagtggctcatgcctataatcccagcaccttgagaggccgaggcaggtggatcacctgagatcgggagtttgagaccagccgggccaatatggtgaaacaagctgtgtctctactaaatacaaaaaattagccgggcgtggtggcacatgcctgtaatcccagctgcttgggagactgagacaggagaattgcttgaacctggaaggcggaggttgcagtgagctgagattgcaacattgtactccagcctgggcaacaagagggaaactccatctcaaaaaaaaaaaaaaagttgtaactgaggctgggcatggtggctcatacctgtaatcccagcactttgaaaagccgaggcaggtagatcacttgagctcagaagttcgagactagcctgggcaacatgacaaaaccccatctctacaaaaaatacgaaaaattagctgggcgtggtggcatgcacctgtagtcctagctacctgggaggctgaggtgggaagattacttgaagctgcagtgagccatggttgtgccactgccctccagtctgggcaacaaagtgagaccctgtctcaaaaaaacaaaaaaaaattataactgatgtaaactggcagtttaggctgggtgtggtggctcaagcctgtaatcctagcactttgggaggccaaggcaggtggatcacctgagttcaggagttcgagaccagcgtggccaacatggtgaaaccttgtctctattaaaaataccaaaattagcaagatgtggtggtgggtgcctataattccagctactcaggaggctgaggcaggaggatcgctggagccagggaggcagaggttacagtaagcaaagatcactccacttcactccagcctgggcaaaagagtgagacatatcaaaaaataaacaaataaataaataaataagtggcagttcatcatttaactccaaagactttgcgtacatttctactgaaaacaatctgagctgattagaaccctgccattttatagcctttagctcgatctccgaccgttcatttaaaaaaattctacttcaggccgggcatggtggctcaagcctgtaatcccatcactgtaggaggccaaagtgggcagatcacttaaggtcaggagtttgagaccagcctggccaccatggtgaaaccccatctctactaaaaatacaaaaattagccgggcttggtggtgagcacctgtaatcccaccctgccgagtggcaggctgaggcaggagaatcgcttgagcccaagagccggaggttgcagtgagccaagcttgcaccattgcactccagcctaggcaacagagtgtgactccatctcaagaaaaaaaaaattctatttcattttacaatatgcagatatatgtccatacacatgcataatataaatgtataccatatttgtgagaatatgcatatatgtacacattagatacacaatacaagcacaatacatatgtcttttgcccaagatacagcattttgtaaaggagacaggaatttagtaatatatgttccagaaacagtacacaagagaattcgccgagatgagaaagttgtcactaggaatggggagtggtaagatgtagaaggtataattgttcttaaagttctactgccaactctttccaattaattacccactctgccatgctttatggacaggaggttgtcggacactgtcaattaataaatatttgagcatgatacactgcttggagctcctctaatataggagagtgatatcctagtgcatgttacagagggagtgtccacacagttcctattgtcatttgatgagttacttttcaggggccttgtacctgagcaagttgtcctctttttgatggatttcagattgagttacctgcattgtcttgagattgcagcgtgtttcctccactgtacggcgtagtcagcagatctattagttaaactccagtgggccctcagtcactaaatctatcctctgtgttgaaggctttctgcatttgcctttcaataaaggtttagaataac

SEQ ID NO: 665 - DNA, 5867 bp, Homo sapiens
aagaatgcaacaaaactgaagtatgttctgccacgttcctgaactgcagccataggagccctcccagccctacccaaaccagcctactccctctcaagagctcacagctgcaggactagagccagatgtgccccggcaataaggacttcttccatggagaagcccctcaccgtcctgcgagtgagcctgtaccatcccacgctgggcccatctgcctttgccaatgtcccaccacggctgcagcatgataccagccctctgcttctcggacgggggcaggacgcccacctccagctgcagctccctcgcctctcccgccgtcacctgtccctggagccctacctggagaaaggcagtgccctgctggccttctgcctcaaggccctgagccgcaagggctgtgtgtgggtcaatgggctgacgctgaggtacctggagcaggtccccctgagcaccgtcaacagggtctccttctcaggcatccagatgctggttcgcgtagaagaaggcacatccctggaggcttttgtctgctatttccatgtcagcccttcacccctgatttacagacctgaggctgaggaaactgacgaatgggaaggcatctcccaggggcagcctccccctggttcagggtagcagatccaggttgcctggggtttctccacggcccttcccagacttgggacagccctctccagccaagacctggaggaggaacagaaatacagctccagagggaacccccagacagtgcactctgctagccctgccactagagcaagcctttgctagatgaaacaggatttgaaatacttgagctgcatcatgcaaggttgacaagcaaaacccactggctgccttgctcataatgaaccaattctgcaaacaccgaacaaacagcccaggggggagaagcaccctctgtggccagagctatgcaatgtaatgggaacatcatatacttttagaggccctgaggggttctggggagcctctctcagcatttccacacatttctccctgttgtctgactaggagttactttatgtggttcattttgtgtgctgcttaagagcaggagtttgaggttgcaccaggaatgcgtggacacatgtaacaattacatttgtggtagcttggggttaccttcagctttcaaatacccacaggcacgcggggcttaggaaagcctgagtgtaataaactgcaagtatttcattaagctggcatacccaataggattccctgatccccagatgggccacatgcacgccacgctgtcatgcagacgtgggggtgggaaatatagacgaggtgtaagaggaaattggaaaggtgggactcacatttctggaaaggatgcaggcagggctcagggtttcctgaggatgggagctgggagctgggcctgcctggaaattcattgtcccccttatcatcctcatcctcacactccgcattctctgtcacttctggatcaaggccttggttgacttgagggcaaggtctttagggaatgaggggatggggtgggggtttgtgtaagaactcagcccagcagttatttcgctcagggtgagtcacacaccaatgggggtgggggaattccttccaaataagggactcgttaggagccaggtacgccaagggcaggaggattttctcggtgaacaagggcagcagctatttgccacgccatgctgagaaggggagagtgtggtttagaaacaacgttcactagtgtgatgcagggagggatctacatggtcaccatgatcccagaccccactctccagggaatctgaggcaccaagggcacagccctgttcccctggctgactcgaatctctgggtctgtagctgtcaacaatttctgttttctgcccaaaaggatgatcgttttgcacccagggcaagctacaaggaggtccaacttcactcacaggccctgagcatcttctccatcaggaaaacagaggtgggcaagacccaggcttgccctggtgtgggaagcttcctctccaatagggatgaagcaaaaacactcagatcacagccacaaggcagggagagcagggctgctaggaaggggctctctgatgctgtgaatgaccccttgggacccccaaagcagttcctcattcattcagcaaaccttcaccaagcacccaccttgtgccagatctgtgcaaagccacggaactgaaccagaagtgaataaggcaaactccctcagggagtttaccttgcactcaggaaagtcaagcattcaggagtgcattacttatttgatcactactatgattagtgctatagtcattgtatttttctctctcctccagctgggctcacattctcttgttaagtggccttgcctgttgagtgcctaccatgtgcttagcactctgctaggtgctgtgtgtattaactgcacttaacagataaggaaactgagacttggaaaggttacatatcttgcccaacatcacaccatcagtagctatgcgatttgggcaagtgatttagtctgctcttgcctctatttctcccgctggaaaatgggtaagataatagtactacctgctagagttacgagggtcttagaaggtgacacctgtaaagcattcaatcagtgcccagcacacacttaataagggttagctactatcatgagacctgagagaggagggctcaccatccacacggagctaaggaagactcacaccccagtaagctggctccagaacccaagggcttacctgtgctctgtgattccccaactagggatttagttgtagccacggacctggtaggcaacagggaggggattttaatctgctccttgcatcagaaggtccaataggcagggttagtataatgggagatgccctggtagggctggcaaggagaagaagccacatgtattttggtctgatgaaaagcagcagtgatctgtcactgaccaaaatggtcccccaactatgcattacggagcagcaacccacatacagaactcgagaagccacggcctggagactgtacctggacaccaaagactggagagaggagctggtggggaaaccccagagttcccagggtgccactccccagctccaccagagaactttgggaatgagctgctgcccctgagtgcccctctccagggcctcagtgagggtctctaccctccagggaggaacaaaaccttgccagctggggtcctgcgagagggggcagttcaattcctccacaggggactctgcaactccaatctttcgagtgaagcatctgcgaggccctcagggacccaggatgaactgcatagcagcagaaggaagacaggccagaccaggcgggagggagcccggaaacatctggtttgtagtttcagactctacccgttcacagttcacacagtctcaccgggaaactcacaccttgccctgtaccaagtttttaaggcagttaagctctgcccatccgagacttcatttttcttgagtagaaaatcactgaaatcatcagatccatggcacccaccttcactttctcctaacagctggaaccgtcaggctggcttcagggcctggtcttcgcacttgatatcactatccctcacctgctcagacagccagagcaggcgggtgagttcctcccaacaacctccactgcattctctcagctcccaccgcagggcagcccacgtgcctgagtgaacatgtgtgcgtgtgcacacacgcaagtatgcacagacatacactaaacacgaacatacagtgcacatgaacgctgctcccagctagggccctctggtcagactgctgcctgggttagaattcttgtccccacccccacttactatagttctgtgatcctggacaagtaactgaatctctccgtgccacagtttcttcttgtagaaaacgggaaagttcacagtacttacctccttagagtcattgtgaaggtcagtttgaggcatcacaaatttaaggcacccagacataagggtcaacagggttagctatcactgtccagtttggtgggaggaactgaatgcatgtaggcacatggacccagtctacactcaggcacaaaaggagctacattagttacattcaggcataccccagagcactacaattctctgagacattgtctggaaatctagaaatcatctccttgccctttaaggtattttaaccctcgcattcctctgcttttccaagaatgtgaatcttgccaagctgtccgtgagagacacgggctcccctcgagggagacttgcaaatgctccataaacagccacagtgtggggctctgccatgaggaagtcacagcagacacgctagacagcatagtcctggatgcaacctggaggaagggaggcccatggtggagcactcactccgtgcctgtctgcccggtgagacctcaagttccttgcagacaaaggccatgggttgttggctcttgtgttcccggtggcctttccagagctgaacagaggacagatgcacagacgggggggctctggtggtcaaggcagcagtccccttggatactaaagtctgagccaggcccctcaggcccggcatgggcagtgcgaggcccatagtggtgggaagccagttggccagctggggtgagaaggccgcgaagccatgggcagacaggaagtggaggtgaatgtctctgcctcctgtaggcctcagcagggacagcacagaccctctggctggggcagcgcagaccctctagctggggcagaacaaggctggtgcttccttctagtccttgagactttgtagctctaactcaagcagaaccctggggttttgggattctgtgtggtgactgctgaggaaggtttatggatttgacagggtgcatgtcacagagagacagttctcagtcagcacttcctgtcccctgcagaggctcataggggacagcccctgccaaggagaccctggaggggctctgaggatagcaatcagaggttgggctggctggactgagcccaggcctgttgcccaccaagtctccataggttctagtctgacccctctctccacccctgggctatgcaggccagcccgtgcagaccacccccgacgcgtccacttgcaacacccgcctcactgtgccaacactccatccacacaggaaaggactgagaacgtgatgcttaacccaaaggagtgagtttcataggatgggtggctttaacagtttcacagcaggacactgagggaatatttccctatcccttcaaatggacggtcactacagaaacgtgtagagcaagactttgtcaaggggctgtttccaggtctcccggtgtctaaatagcagagctggaatgggaactgagaaccgattctttccacaaccgcccactgagcagcaaggctgcagccagcaaagaggtgcggaggcaagcaagctccatgtggtggggacagcgcattgcgacctccaccacccctgcagtgggctgccagctgagccacctgtcttccactgtatctactgtacgaacttctccagctctgctctgttttctcttcctcagcatccaccccgtgacacgtagtggtggctgatgtcgccacagtaccatgaggttaacaggtcctccctccagcttccctcatggtggcagcctaacctgcattgcagccgttcaccggacaccgcaccagaccctcaaaacccatccaagactgtgggaggagtaaacaacccagcccagttaagaggagatgccgaatttaatgaaccctatttgaattgcagggctgtgattcctcttacctttaacgtgaactcacaggcggattaaagtgaaataaaaccta

SEQ ID NO: 666 - DNA, 5513 bp, Homo sapiens
gccctctcctgtgacctcggctgaaaagaagaagccagtgtttgagaaaagcttcgtgagacttcagatggattttaaaattgaacacacttgggatggttttccagtgaagcatgagcccgtatttatcaggctgaatccaggtgacagaggagtgatgatggacattagtgctccatttttcagggatcctccagccccacttggagaaccaggaaaacctttcaatgaactgtgggattatgaagttgtggaagcatttttcttgaatgatataactgagcaatatttagaagttgaactttgtccccacggacagcatttagtgcttttactttctggaagaagaaatgtgtggaaacaagaacttcctttatcgttcagaatgtccagaggagagacaaaatgggaaggcaaagcttatctcccttggagttattttccaccaaatgtgacaaaattcaattcatttgcaattcatggatcaaaagataaacgaagttatgaagctctttaccctgtacctcagcatgaactgcagcaaggacaaaaacctgatttccattgcctagaatacttcaagtctttcaattttaacacactgcttggagaagagtggaaacaaccggaatcagacctgtggctaatagagaaatgtgatatataggagtaatagataaccataccgatcattttttcctctataccttttaagataaacaaaaaataaatatcaattttttaagatgtcatgcatacatttcaacaacaaatatcttcatagaagtcactgaaaatatagtatctgtggcaaattgtatatgattaacaagaaaatatatgattctttgtagatgatttcatctgtaaagtcacaatgtttctcagagtcacttagtccaggatgttgcattcccagcacacagtacagttattcttgaaaactacaagtgaaaaagggggaacaattgaggttgtccaaggccacctagaggactgtcttgcactaccttgtgattcaaccatttcattcctagatatataccccagaaaaatgactgctcatagcagctttattcataatagcacaaaattgtaaacagtgaaatttccatccataggaaaatggatagacaaactacaatatagtcagtggaatactgttcatttaaaaaaggactgctgatacatgcaacaacctgtatgaatctcaaaaacattaagttgagcaaaacaaaccaaacataacatactatctaattacttttatattaaagccacttccaggcaaaactaatatttgatgatagataccagaacagtggctgcttagagtgagggcagggaattcaaattgaatggaaaaggggcctgaggaaattttccggggtgattgaaatgttttgtattttgatctggatgatggttatgtagctgcatatatttgtcaacattcctcatgctgtatgtttagatttgtgattttactatatgtaaattaattccttaataaaatactattataaaataagctgtaaattaaatggaattaacttcaagtttacattgagtttatatgtttccattgaacaatcactagtgatggttaaatgtggcttatcgacttactcatttcttatatatgttctctatctaaaaagagagctggtgtaagataaatgctaacttttacaaaaggtattattaagtatcctgactacacatcatggtggcagtgttaggcatcttagataaattgagaaattattcttaaaactgacaatagcaactaattaatttgatatagaaacgatctgcctgttttagatacgaatggcatattttaaataacctaggacgatttatttataaattacctgaataattttataaatgcatataaaactatcaaaataaaaacaagatatattttagagcatcttgattttagaagcgaatcgaacactgtgaatcacagtttcagatataaatcataactatttataatatggataaaaatgaagcacaaatatgatagatacaatcacaacaatataaaatactgaatttgaatgttgtagcttgtgagctttctcaaatctaatgtgtatctttttaaaatttgtttagatgttttttaaacatctcttaactttctttcatctagataaggcatttccttttcttccaataccaagcaagcaaaaatacattatataaacattttcttttgaaaggaacatgcatatcaactacagaatttcggaaagcttgtccattagtcaggtacaaatgatatattctagaaacttgtatccaagaaacttttatttgagagtgggtgtttgtaatagccatttcaaatttgtttttcaacttcaggaccatgaaagaataatcatccttttgtttaaaatatgcataaatgcatttctttgctgtgatttgaattgttcactgcagtgtcaagcagattctctcttctcaccacctaaatagattacacaatgtgcatatttattcaggtgcattctcatgctttttcccagctccaggaaagtgtaagtcacagtctgaagggaaatgtgctttttatttttggctccaaactactttttttaaacgttaaaaaggttttttgccacaggaaaaaaaacatttaatttcccctccttctcctccttttgctccttttttaaatgttaggcttttggaggacagaagataatgagcataattaatctgatattgaaaaagaaagggtagcaagtggataaagcaattacagtaagccctcagcccttttctcatgcctcaaagcttaaggattgtctcttcttttccatgtaaatttccataatattttacacattgctttattacagcatttatttcactggtcctagatagctcttctgacccacctcctatcctctcagcctaactttttactccagccatcagttgcatacagtgaactgactggccagttgcctcagctgtactgtgtatgtcttacttcctgcccctagggcttctctgcttcctctgctgtgtggaacacttgcaggaacccatttagccattctctcacatgaactacccgggatgtgtgaagggactaaaacaccccatggggcacctcttgaccaaagagggtgggagttgatggataactacttctctgttacatccctcagtttaacaatttatggtcccttccacacagctcctcagaagttctcttaaaaggattccaccctgattacccacagcagtggccaactagtaacacatttttgcattatctttccttcatttccatcattttctgttttgctcttcctggtacctctctcctctctggaattgcttaactacagtcaacctctttggaagttattgtcctatgtttgcttcatggggaacccaggctaagtcagtgattacctaaagcagccctagaaagccgttcgtcaggatgagaatctagaattgtatcacagggcatttggtgacaaggaccccattgttggtggtaatggctctgctataagtaacttcacagttattaaaacagtggtagactggcttgaggtgcagctgaggcacctgaagctatgaaagccatctagtcataatgactcttcgtgtcaactgttcagcaggcaaatagaagcgggctaccatgcagagctagagttataactattaatggaagcagtatagagtatgtccttcctaggggattcattgagtcatcctttggtgtttcaatgtcaagtggtaatcttaaatgggcaactgtagcaaccacagcctgacaaggtaaagcaactaaggactctgaccctttgaggataaaggtctaggtcacctcaccattcaaaccacttgaaactactgaagagtttggccaaatgtgagagaaatacagaatttgtgatggaagagagagatgataactatcaattatagacttgaaatcagttacaggagccacataacttgttccactaaatcttttgcatttagtatttgtataatggctgcccacttccttgaagactctgtgacagattggactcaatgtggaatgtgtgtggctctgagtgctgcaaggagtggactgtatttaatatctcttgtgtcctacctcacatcctcttaggccatttttcaattcacccattttactctttgatagcactttacctcttttgtcccatgtatctctagatttctgtattagtgcttttctgacacctcagttatgtggaacacctgtgggaatctgctaatctactctgacgtatatgcaaacctggaagtttgagggaattgacaatagggacaggattcagtggataaatactccccttttccgtcccttgggcagacaattctgaagtgcattctgtatagttccttagtggtctccagtaggactccactagggtcttcagttacctacagtactgatcagcttaaaaatgcaatcttagattggcttgctttatttaatttttccaaagttcccaatcccattccttagaatcacattccaaaattaatgcactgcacacaaccctctgcttttgtcaggggtagaaggggtatccagcctaaggcacctaagtccaagaggaatatgtgcctaacaaatcttctaactaaatatatatatatatatatatatatatataaaatatatatgtttatatataacatatatatatagagagagagcataaaatgtgctgtgtatgtgtgtagcatattttttgttaaatcaccattcctgggccctactcattttctgataatttcttatcttaatttgctctgaaagagcaaaacttataaaattgactattgtaactctattttttaccaactatcatttttcatggaaggaatagtaaaaagagttacctctgaagctaagatgacacatgtatgaggaatataggaagccagaaatcatgaatctatgaaaagtgaggggtgtctgtgcatattttattttatttcataataaataaccagtaattaaaatattcttttccatgtaatgggatctacgagtaaatttttgtctgatatttataaatctaatatgtaatataaaggagaaataggaaatgctgtcaaatgacatttcactttactacttatttgaattacaatgaaataatatatagctacatcactggctcctgagagagctttgggtgttctgtaaattttttactttgcactcttgaaaaattcgcagagaatgcaaggtttagtaaaaatttattttcttttggcagcctatcacctgtaatttccgttaaacagcatttctgactcaatagtacactgaaagcccatgtttgtaataatgccctaaagcactgcagtacctagagtatatattttgaagagatagctttgctgaaatagaaaaccaaactgtaaattgaagtctgagcattcagagaaataaaaattatgctaaaaacaaa

SEQ ID NO: 667 - DNA, 923 bp, Homo sapiens
ctctgtagatcgctgagcgatactttcggcagcacctccttgattctcagttttgctggaggccgcaaccaggcccgcgccgccaccatgtttcgaaatcagtatgacaatgatgtcactgtttggagcccccagggcaggattcatcaaattgaatatgcaatggaagctgttaaacaaggttcagccacagttggtctgaaatcaaaaactcatgcagttttggttgcattgaaaagggcgcaatcagagcttgcagctcatcagaaaaaaattctccatgttgacaaccatattggtatctcaattgcggggcttactgctgatgctagactgttatgtaattttatgcgtcaggagtgtttggattccagatttgtattcgatagaccactgcctgtgtctcgtcttgtatctctaattggaagcagtatcctttttatgttagcatttatggatatgaactttgaagggttttgatacttgtgttaattattaggaatataataataatatgacataggtaagattgtgaaaactttaaaacaacaaattggattgctctttcattagcctttataagcaatttatatttgctagacacaaataagcccaacttcaggaaaatcatctaagcatctttttagaggggatttaaagtttcttaatggttctagatgtcccaagaaatcctagaccccttgtatccaaaacaaatcaggttttagatgggaagaaattattttgctggcactctttcttaggttcggtagaaagtcaaacattttatattaggccaaagaaatagtgtcctattgcattatttctctggtggattatgcaacaattaaagaataagccagagacctttgttaataatgtataatttgaaaataaagacagtacttcattccttgttaaaa

SEQ ID NO: 668 - DNA, 3642 bp, Homo sapiens
agtctcatttaaagctcccactggttttactgaaaaattgagtgggctcagtttctgcagcgctttcttccactgcaagatgaacaccattctgccttgccaagaccagtactttgtaggaggccagagctataattgcccgtattccactacaacgtcagaatctagtgttgacgtttccacggagacttgggtctctttctgggctgctggtctcctggacaacagagagctccaacaagcaccacaggcacaggaatcattcagtgactcaaattttcctcttccggacttgtgctcatgggaagaggctcagctttcctctcagctctacagaaataagcagctgcaagataccctggtgcagaaggaagaagaactcgccaggttacacgaagagaataatcacctcagacaatacctgaattctgctttggttaaatgtcttgaagaaaaggccaagaaattgctctcatctgatgagttctccaaagcatatggaaaattcaggaaggggaagagaaaatccaaagagcaaagatactctcctgctgagattccccatcccaaaaatgccaaaagaaacctctctagtgaatttgctaactgtgaagaacaagctgggccccctgtggatccctgggtccttcaaacacttgggttaaaagaccttgacactatcgatgacacctcatcagctaactacagtgccctcgcatctcatcccagaagagtcgccagcacattttcccagtttccggatgatgcagttgattataaaaatatccccagagaggatatgccaattgactatagaggtgacagaacaacccccttgcacagcactgccactcatggagaagatttccacatcctttctcaactttcaaatcccccagtggggctgaaaactcttccttactatactgctcatgtgtcacccaacaagacagagatggcattttccacatccctgagccctcattgtaatgtgaaaactcattccttccaccagggacaagcctttgtgcgtcgagatgaggagggaggctggaagtttacctgggtccctaagcagtcttagtgacccctcttttatcacaaagcactgccacgaactctgtttacaaagacctctcttgcacttgaatttgactatgtggaacacagaagctgttgcttagactgtctcctgccactttaaatgtcactctcaattacccacttaaatctgcagggaatggcttccaagaatccataatgaaacgtgtccgcgcttcttttacctaaatttgacttgtttacacaccaatacctgctattgacatcctctctttgccctatacttgataaggtattttccactcacttctatattcctttaagacctagatacatttttccaattttaaccagtttaacagattttcctcttttaagtagttgaaatattcacagcccttttacttttctccctttgtcatttctgaaaactgtctttagaatgagccctatttttgcttcaagtacttgctactgcatgttcaaatagctgagggtggggttgaaacaagtgtctttgcccatcaccactactcctgaagacataatgtggatgtgtgtagcattatgttcatggcagttcaaaaagttcagtgccccatagtggcattgacaaagcctcttaaaacaactgtaactccactaataatcaatatcacagataaactttaaaattacaaagaatttaaattatttttaaatgcctcatgatgtatcagcttctatatgtacccagcatcatttctttaaccaacatgactccaagaagaacattttgagggactgtggtaacaaaactagtcatcatctgcaactacccagatgctgacaaactcctattgctgaaaatagactaacctagctcagccattgtctcattcattcattcattcgcgtattcattttttcattgatcagtccacccaagaaatctgtagaatacctaatgcctactttgtaccaggcactatgctatgtgatggtgataaaatacaagcaatttagacactgtggccaccatcatgagacttagacctactcatctgctatgactttgcgaaaacgacttcccttttgtgaaggttcagtttcccaactgtagaatacagaagttggactagataattactaatattctatgaattgaggctgggtcctatcagatttactccaacatggcagtttcaggtcactgaagaaactaaagagaagtctttagataggcactgcaagtattaggtagggtaaactttatgtacaattaataaaattcaaaaacataagtcatttgaagttaacattagaaatcattgctctgatcacagtactctttttctagagcccattttgcagttaactcggcgtaactgtgtaagaataatttgcctctaaaaatagatacatattaatttttaaataagtgcggatagattgcatataaatattgctatcaaggacttcatatttctaaatttgaaacaatatattttcagtgcttgtgctagttttcttctttcccatctctcaagacccctatcattcccagaataatttgcacatcctgcatgtgcacctatgttttttggacaaacttcaattaatgatgaaatctttcatgttgaaacctgttctcatttttctcttttccacatctcaataagtcatcttgcacaatcaatatctcgtaggtcaactgtgttggttaggattctttgtaacagagacatgcctttcattgttgtttctgtttggttgttgctttattttggtgatgtaagcaaagggtctgttttataaagttttgttgccacccacttttaaaaataatttatgaagaaaatccaatatagtaattaatattactctctggagtactttaagaagtagaacacattccattttctaaaaaataaaataaaataaataactgtgccttttacattctggtatctgggcccctggtcggtgaaatttgtcgctttttagaataagagatttaaggattcgaattattgtactttatgacactaggaattgagaaagtaatataactaattttgaaagtctaataatcaagctgtaaaaggaaatgtatgagttaacaaatatttattttgcattctttgtgtgccttatcatgtgttaagtaccatgagggtacacccaggcttagcacaatgcatttggtatacaaaaccatgtaaaatgtcatagcttttgatagcttttaaatgaaacttaattttggcccagtttaaagatattaccgaacatttgggataaaatgtgatggtttcctggcttctatcatggacgatgttatggaagacaattaccacgtttttgaaatcatgtctataaatatttaatatccatttaaattatgtatagaaaattattttgttcatgttttagaaattaaacatttctttcacctgagtatatgttttacttgtatggcttcaccatgtctctctggtaaaccacagttaatattttaagctatagtgggaaataaaaactcttttgtgattgcggtaactatttttataccatgcttaacattccctaatagcagat

SEQ ID NO: 669 - DNA, 6502 bp, Homo sapiens
atcgaggtccgcgggaggctcggagcgcgccaggcggacactcctctcggctcctccccggcagcggcggcggctcggagcgggctccggggctcgggtgcagcggccagcgggcgcctggcggcgaggattacccggggaagtggttgtctcctggctggagccgcgagacgggcgctcagggcgcggggccggcggcggcgaacgagaggacggactctggcggccgggtcgttggccgcggggagcgcgggcaccgggcgagcaggccgcgtcgcgctcaccatggtcagctactgggacaccggggtcctgctgtgcgcgctgctcagctgtctgcttctcacaggatctagttcaggttcaaaattaaaagatcctgaactgagtttaaaaggcacccagcacatcatgcaagcaggccagacactgcatctccaatgcaggggggaagcagcccataaatggtctttgcctgaaatggtgagtaaggaaagcgaaaggctgagcataactaaatctgcctgtggaagaaatggcaaacaattctgcagtactttaaccttgaacacagctcaagcaaaccacactggcttctacagctgcaaatatctagctgtacctacttcaaagaagaaggaaacagaatctgcaatctatatatttattagtgatacaggtagacctttcgtagagatgtacagtgaaatccccgaaattatacacatgactgaaggaagggagctcgtcattccctgccgggttacgtcacctaacatcactgttactttaaaaaagtttccacttgacactttgatccctgatggaaaacgcataatctgggacagtagaaagggcttcatcatatcaaatgcaacgtacaaagaaatagggcttctgacctgtgaagcaacagtcaatgggcatttgtataagacaaactatctcacacatcgacaaaccaatacaatcatagatgtccaaataagcacaccacgcccagtcaaattacttagaggccatactcttgtcctcaattgtactgctaccactcccttgaacacgagagttcaaatgacctggagttaccctgatgaaaaaaataagagagcttccgtaaggcgacgaattgaccaaagcaattcccatgccaacatattctacagtgttcttactattgacaaaatgcagaacaaagacaaaggactttatacttgtcgtgtaaggagtggaccatcattcaaatctgttaacacctcagtgcatatatatgataaagcattcatcactgtgaaacatcgaaaacagcaggtgcttgaaaccgtagctggcaagcggtcttaccggctctctatgaaagtgaaggcatttccctcgccggaagttgtatggttaaaagatgggttacctgcgactgagaaatctgctcgctatttgactcgtggctactcgttaattatcaaggacgtaactgaagaggatgcagggaattatacaatcttgctgagcataaaacagtcaaatgtgtttaaaaacctcactgccactctaattgtcaatgtgaaaccccagatttacgaaaaggccgtgtcatcgtttccagacccggctctctacccactgggcagcagacaaatcctgacttgtaccgcatatggtatccctcaacctacaatcaagtggttctggcacccctgtaaccataatcattccgaagcaaggtgtgacttttgttccaataatgaagagtcctttatcctggatgctgacagcaacatgggaaacagaattgagagcatcactcagcgcatggcaataatagaaggaaagaataagatggctagcaccttggttgtggctgactctagaatttctggaatctacatttgcatagcttccaataaagttgggactgtgggaagaaacataagcttttatatcacagatgtgccaaatgggtttcatgttaacttggaaaaaatgccgacggaaggagaggacctgaaactgtcttgcacagttaacaagttcttatacagagacgttacttggattttactgcggacagttaataacagaacaatgcactacagtattagcaagcaaaaaatggccatcactaaggagcactccatcactcttaatcttaccatcatgaatgtttccctgcaagattcaggcacctatgcctgcagagccaggaatgtatacacaggggaagaaatcctccagaagaaagaaattacaatcagaggtgagcactgcaacaaaaaggctgttttctctcggatctccaaatttaaaagcacaaggaatgattgtaccacacaaagtaatgtaaaacattaaaggactcattaaaaagtaacagttgtctcatatcatcttgatttattgtcactgttgctaactttcaggctcggaggagatgctcctcccaaaatgagttcggagatgatagcagtaataatgagacccccgggccccagctctgggccccccattcaggccgagggggctgctccggggggccgacttggtgcacgtttggatttggaggatccctgcactgccttctctgtgtttgttgctcttgctgttttctcctgcctgataaacaacaacttgggatgatcctttccttccattttgatgccaacctctttttatttttaagtgttgaagctgcacaaactgaataatttaaacaaatgctggtttctgccaaagatggacacgaataagttaattttccagctcagaatgagtacagttgaatttgagactctgtcggacttctgcctggttttatttgggactatttcatctgctcttgatttgtaaatagcacctggatagcaagttataatgcttatttatttgaaaatgctttttttttttttacgttaagcacatttatcttgaactggagcttctaaaatgggccccaggggtgcaagatgttggtgtaattcagagatagtaaaggtttatcgcagtgtgaattataagagtccatccaaatcaacgtcccctccctcctctcatgcgatccaggtaattatgcagttagtgccacagtagactagcctagcaaagggtttgctccttgctgtctctgactgcaccacacagctattgatggcagctgaaagaaagtggatcatgccttaattttaaatattcctgtcctctggttattattttaaggaacttcatcatgttaaaatgacagcattcaaaggtgtaccacaatcaatttatcaaggaaataaaggctattgtaaccagagatttaatgcattcttctaaatgtaaatttaaaatttgccctttaaaaaagtccactttccccatatgcaaatgttaataggatttttatggggattaagaagcggcaaaactacagaagcagaattcaaagtaatttaaaaaatacacaccagttttaaatcaagagaagttgtaatctcttgttttaagcttgcgtttgagggaaaatgactttttcaccaatttaatatgcattgttctgttgtttttatttatgattgatcattatatgtgacttgcataaactatttaaaaaaaaaaactataatgaccaaaatagccatggctgagaaacacagtggctgggcagttcaataggaggtgacaatatgacaacttctcaagcttgggaactcaccagactgtttcctcctttaggtaacagattctgtcccacggctaaacttgtctttcacgtgggaattgcttttgtcaaacgtgaaagagtaaacaatagcatttccccagaatgccagttttatggagccccaaatgctctgaaaacaattagtaacctggaagttgtcagcccaaaggaaagaaaaatcaattgtatcttgaaattttacctatggctctttggcctggcttctttgttcattataagttagtgtgttccttcaggaaacaatgccttaataccatagaacatgggggccttaatagttgctaacattaaaaaagcaaacagaatgattgagggatccttatgaaaacaaaatggtgaattggacatgcagaacctaccatttccttcccctgtttgcaatttttgtggggaggggaggatgttagtatttacaaaagatgattttaagaacttccaagagatgagtttaagaattccatagagtattagttgttcactgtgtaattaatccttccggagagtctttttttttttttttaaagaaacttttgggtgggttttgttttttattagttaccctaggggtatgttaccctggggtatgaagggaggtgaagataacggaggggggagaaaaaaaaaaggagaaaaaaggagcctaaaatggggaataattgaaatggaacagggggtgtgaggctggttcctcagtccccattccaaacggaggatagaagctgtgtatttatgtgacctggcagatctctggggccataacactgaaaagtgaaagaacctggtgggcagctatctttggctactgataaccagcagaaatgtctgttaattctgattttctcaatttgaagggatcagctacactgttaaattttggaaagccactacctacttccatcaagtaacttaggtttcgaaatatgggttcaacgcacctcccttattcaaaatgtcaaaatagattattataatgtataaagtaagaattgacaaaatatgattcttgggttgattggtcatttagaaactagccaaaagtgagacttttaatgtagaacatttttcagaaatgggtacaaagaaaaatgcatattactgtatatttcagagtgtttatgtgaaccttgtatttaattgagagtcccatgtacgttctgcagcctttttgctgcttctatcatctgaagtttgtgtagtacaaataaggcctttgggattcttaatgacatttatgttaaaatgttctcttctctttaaacaccgttttccaatccacctgtcagggagtccaaatcgtgtctgtgttgatgatgctatactttgtagctagaaaaacaattttagtgttgtgggctctgtattcagacttcctttttacaagaccgatgggcagtgatagattattttatcatatttaatgcatgggaaatagtgtgctgaggaagctattaaaagtataactcagtgaattgggtctgagttttaaatgagatatttcaaaattggcttgccactgtaaaagcgactaaataataatatgatactgttctttatgatcttgtcatgtttcactgatatgtttggggtcttcactatgtaaaaaatgtcaaaattgtaatgagcaagcatgtacaagtagtcgtaaatcaaaggttttaaacaggactgcattttcaattaggaaaagctgtttggcagatagcatccaatgcaaaaacagaaatatcgtaacgttctgcttagtgggcaagataagataggaaagacatgctcaaagaggcaaaagaatcattgctatcattcattctacactagtttgaagaagtttttgtacatcagagcacttccttcagcacacttttttgccttcagatttcattttttataaaatgagaagactaatgataaactgtagaaatcaaaatttattgagaaatctgtttctcctaacagatagtaaccctgccatgatatactacttcaacaatgttataaaatttatgtgataatatacattttaacctgggatttctaaattgctttaacaaatgctaatcctgagagttgccctgcaggactcaaaagggaaaggttttgggacgtggcagaaccctgcagggacatggaattaaggccattgcaatgtatcatctttgtagcattgtcatcactcctaagctgccttcacagttttagtacactaagatgaggaaatcgaaaatgggcagagaaagctcatactgtataattgaagacagtgacagagaacgtgtcagttatgccaaaactcttttgatttctgttccaggatttccaacaagaggggaaaggaatgacttgggagggtgggaaagacattaggagttgtttttattttttaccttggaagctttagctaccaatccagtaccctcctaactagaatgtatacacatcagcaggactgactgactacttcattagagatatactgtactcattgggggccttgggggtactgctgttcttatgtgggattttaatgttgtaatgtattgcatcttaatgtattgaattcattttgttgtactatattggttggcattttattaaaataaattgtattgtatcatatttgtatgttttaagagaaaataatataaaatacaatatttgtactattatatagtgcaaaaactacaaatctgtgcctctgcctcttgaattaattctttggttgcttgcatttgggaagggaatggagaaaggaaagaaccaataaagctttcaaagttcaagaaa

SEQ ID NO: 670 - DNA, 1933 bp, Homo sapiens
gcagactgcggcggcggtggtctgaggaagttctatcttggcgctaaagcggagacgcatcccccgacccgaggctacgatgagcacaccggccgtgccccaggacctgcagctgcccccgagtcagagggcgcagtccgcattcaaagagcaaagaagacaaaaactcaaggaacatctgttgagaagaaaaacgctttttgcatacaagcaggaaaatgagatgttatccagtagagatcagagagttgtgacatctgaggaccaagttcaagaagggactaaagtgctgaaacttaaaacaaaaatggctgataaagaaaacatgaagagacctgcagagagcaaaaataatacagtggtggggaaacattgtattcctttaaaaccttcaaatgaactaaccaattcaactgtagtaattgacacacataaacctaaggatagtaatcaaactccgcatttgttactaactgaagatgatccccaaagtcaacatatgacattaagccaggcatttcaccttaaaaacaatagtaaaaagaaacaaatgactacagaaaaacaaaagcaagatgctaacatgcccaagaaacctgtgcttggatcttatcgtggccagattgttcagtctaagattaattcatttagaaaacctctacaagtcaaagatgagagttctgcagcaacaaagaaactttcagccactatacctaaagccacaaaacctcagcctgtaaacaccagcagtgtaacagtgaaaagtaatagatcctccaatatgactgccactactaaatttgtgagcactacatctcagaacacacaacttgtgcgacctcctattagaagtcatcacagtaatacccgggacactgtgaaacaaggcatcagtagaacttctgccaatgttacaatccggaaagggcctcatgaaaaagaactattacaatcaaaaacagctttatctagtgtcaaaaccagttcttctcaaggtataataagaaataagactctatcaagatccatagcatctgaagttatagccaggcctgcttcattgtctaatgataaactgatggaaaagtcagagcccgttgaccagcgaagacatactgcaggaaaagcaattgttgatagtagatcagctcagcccaaagaaacctcggaagagagaaaagctcgtctgagtgagtggaaagctggcaaaggaagagtgctaaaaaggccccctaattcagtagttactcagcatgagcctgcaggacaaaatgaaaaaccagttgggtctttttggactaccatggcagaagaagatgaacaaagattatttactgaaaaagtaaacaacacattttctgaatgcctgaacttgattaatgagggatgtccaaaagaagatatactggtcacactgaatgacctgattaaaaatattccagatgccaaaaagcttgttaagtattggatatgtcttgcacttattgaaccaatcacaagtcctattgaaaatattattgcaatctatgagaaagccattctggcaggggctcaggtaagataaaaatttactgatctttacaattacagtgtagtagacaattcggaattaatttgaaacacatcacaacataacttgagaaaattttctttgtatatgtagtggtaataaatgtttaaaggctgcaaggattgcattataaaagctgtttgttggctttctaagtcttttattcctgtattgggaataatcagattttagaaaatggatataagctgaaatgtatatttaatgaaactttctgcatgaaatgttttagcatattattgtatgcatttcctggttggaagtttactgggagactgaatgtaatattaaaatttgtttattgaatataaagcaaaagggattaaattcgctttttaaatgtta

SEQ ID NO: 671 - DNA, 2646 bp, Homo sapiens
agacttcacggacaaagtcccttggaaccagagagaagccgggatggaaactccaaacaccacagaggactatgacacgaccacagagtttgactatggggatgcaactccgtgccagaaggtgaacgagagggcctttggggcccaactgctgccccctctgtactccttggtatttgtcattggcctggttggaaacatcctggtggtcctggtccttgtgcaatacaagaggctaaaaaacatgaccagcatctacctcctgaacctggccatttctgacctgctcttcctgttcacgcttcccttctggatcgactacaagttgaaggatgactgggtttttggtgatgccatgtgtaagatcctctctgggttttattacacaggcttgtacagcgagatctttttcatcatcctgctgacgattgacaggtacctggccatcgtccacgccgtgtttgccttgcgggcacggaccgtcacttttggtgtcatcaccagcatcatcatttgggccctggccatcttggcttccatgccaggcttatacttttccaagacccaatgggaattcactcaccacacctgcagccttcactttcctcacgaaagcctacgagagtggaagctgtttcaggctctgaaactgaacctctttgggctggtattgcctttgttggtcatgatcatctgctacacagggattataaagattctgctaagacgaccaaatgagaagaaatccaaagctgtccgtttgatttttgtcatcatgatcatcttttttctcttttggaccccctacaatttgactatacttatttctgttttccaagacttcctgttcacccatgagtgtgagcagagcagacatttggacctggctgtgcaagtgacggaggtgatcgcctacacgcactgctgtgtcaacccagtgatctacgccttcgttggtgagaggttccggaagtacctgcggcagttgttccacaggcgtgtggctgtgcacctggttaaatggctccccttcctctccgtggacaggctggagagggtcagctccacatctccctccacaggggagcatgaactctctgctgggttctgactcagaccataggaggccaacccaaaataagcaggcgtgacctgccaggcacactgagccagcagcctggctctcccagccaggttctgactcttggcacagcatggagtcacagccacttgggatagagagggaatgtaatggtggcctggggcttctgaggcttctggggcttcagtcttttccatgaacttctcccctggtagaaagaagatgaatgagcaaaaccaaatattccagagactgggactaagtgtaccagagaagggcttggactcaagcaagatttcagatttgtgaccattagcatttgtcaacaaagtcacccacttcccactattgcttgcacaaaccaattaaacccagtagtggtgactgtgggctccattcaaagtgagctcctaagccatgggagacactgatgtatgaggaatttctgttcttccatcacctccccccccccgccaccctcccactgccaaagaacttggaaatagtgatttccacagtgactccactctgagtcccagagccaatcagtagccagcatctgcctccccttcactcccaccgcaggatttgggctcttggaatcctggggaacatagaactcatgacggaagagttgagacctaacgagaaatagaaatggggaactactgctggcagtggaactaagaaagcccttaggaagaatttttatatccactaaaatcaaacaattcagggagtgggctaagcacgggccatatgaataacatggtgtgcttcttaaaatagccataaaggggagggactcatcatttccatttacccttcttttctgactatttttcagaatctctcttcttttcaagttgggtgatatgttggtagattctaatggctttattgcagcgattaataacaggcaaaaggaagcagggttggtttcccttctttttgttcttcatctaagccttctggttttatgggtcagagttccgactgccatcttggacttgtcagcaaaaaaaaaaaataataataataataaggcctgctgtgtaagctgacagtatttgtagctgatagggggttgggaggaaagtgtctactaggagggtggggtgagattctgtgttgatgtaggaggccgagaaggcccttaactcaaagtagcttatttatccaaaatgttctggatgcatcatctccaaccaaggaccccttatttatcatgcctttgttctcttttccctcagatgtatatttctttaaaaataattttcctaataacaaaacttatttctaaaacagcttaaaaattcaaagaaaaaccccaaacactgacattacctacacttccactacccaaagacaaaatgtgcccactgtgtgcttttgagtgtattttcttttagtttgttttttgttgggtgcatatttatgataataacaatgatggacttcaattgtactcactgttctattgttggttttaattagcagcaagttgtgatcactttcccaggtgaataaatcatttcaaagca

SEQ ID NO: 672 - DNA, 3904 bp, Homo sapiens
gcatcctgggttcaagcagttctcctgtctcagcctcccgagtagctgagattacaggtttcaggcacagaactgtatatccaataatagtgaaatggatcccactaattatgacagaaatgatgatacatttaaatgacttggatgttttataggttggcactcatcatgagcccctgttctcattctgcaaatggtgaagctctctattgtcctgaccccacagttcctgtcccatgaccagggccagctcaccaaggagctgcagcagcatgtaaagtcagtgacatgcccatgcgagtacctgaggaaggttatcaatactctggctgaccatcatcatcgtgggactgactttggtggaagtccttggttacatgtcattattgcgtttccgacaagttataaagttgtcattaccctctggatagtttacctttgggtgtctctcctgaagactatcttctggtctcgaaatggacatgatggatccacggatgtacagcagagagcctggaggtccaaccgccgtagacaggaagggctgaggtccatttgtatgcacacaaagaaaagagtttcttcctttcgaggaaataaaattggcctgaaagacgtcattactctacggagacatgtggaaacaaaagttagagctaaaatccgtaagaggaaggtgacaacgaaaatcaaccatcatgacaaaatcaatggaaagaggaagaccgccagaaaacagaaaatgtttcaacgtgcgcaagagttgcggcggcgggcagaggactaccacaaatgcaaaatccccccttctgcaagaaaggctctttgcaactgggtcagaatggcggcagcggagcatcgtcattcttcaggattgccctactggccctacctcacagctgaaactttaaaaaacaggatgggccaccagccacctcctccaactcaacaacattctataactgataactccctgagcctcaagacacctcccgagtgtgtgctcactccccttccaccctcagcggatgataatctcaagacacctcccgagtgtgtgctcactccccttccaccctcagcggatgataatctcaagacacctcctgagtgtctgctcactccccttccaccctcagcggatgataatctcaagacacctcctgagtgtctgctcactccccttccaccctcagcggatgataatctcaagacacctcccgagtgtctgctcactccccttccaccctcagctccaccctcagctccaccctcagcggatgataatctcaagacacgtgccgagtgtctgctccatccccttccaccctcagcggatgataatctcaagacaccttccgagcgtcagctcactccccttccaccctcagctccaccctcagcagatgataatatcaagacacctgccgagcgtctgcgggggccgcttccaccctcagcggatgataatctcaagacaccttccgagcgtcagctcactccccttccaccctcagctccaccctcagcagatgataatatcaagacacctgccgagcgtctgcgggggccgcttccaccctcagcggatgataatctcaagacaccttccgagcgtcagctcactccccttccaccctcagctccaccctcagcagatgataatatcaagacacctgccgagcgtctgcgggggccgcttccaccctcagcggatgataatctcaagacaccttccgagcgtcagctcactccccttccaccctcagctccaccctcagcagatgataatatcaagacacctgccgagcgtctgcgggggccgcttccaccctcagcggatgataatctcaagacaccttccgagcgtcagctcactccccttccaccctcagctccaccctcagcagatgataatatcaagacacctgccttccaccctcagcggatgataatctcaagacaccttccgagcgtcagctcactccccttccaccctcagctccactctcagcagatgataatatcaagatacctgctgagcgtctgcggattccgcttccaccatcagccgatgataatctcaagacaccttccgagcgtcagctcactccccttccaccctcagctccaccctcagcagatgataatatcaagacacctgccgagcgtctgcgggggccgcttccaccctcagcggatgataatctcaagacaccttccgagcgtcagctcactccccttccaccctcagctccaccctcagcagatgataatatcaagacacctgccgagcgtctgcgggggccgcttccaccctcagcggatgataatctcaagacaccttccgagcgtcagctcactccccttccaccctcagctccaccctcagcagatgataatatcaagacacctgccgagcgtctgcggggagcgtctgcgggggccgcttccaccctcagcggatgataatctcaagacaccttccgagcgtcagctcactccccttccaccctcagctccaccctcagcagatgataatatcaagacacctgccgagcgtctgcggaggccgcttccaccctcagcggatgataatctcaagacaccttccgagcgtcagctcactccccttccaccctcagctccaccctcagcagatgataatatcaagacacctgccgagcgtctgcgggggccgcttccaccctcagcggatgataatctcaagacaccttccgagcgtcagctcactccccttccaccctcagctccaccctcagcagatgataatatcaagacacctgccgagcgtctgcgggggccgcttccaccctcagcggatgataatctcaagacaccttccgagcgtcagctcactccccttccaccctcagctccaccctcagcagatgataatatcaagacacctgccgagcgtctgcgggggccgcttccaccctcagcggatgataatctcaagacaccttccgagcgtcagctcactccccttccaccctcagctccaccctcagcagatgataatatcaagacacctgccgagcgtctgcgggggccgcttccaccctcagcggatgataatctcaagacaccttctgagcgtcagctcactccccttccaccctcagctccaccctcagcagatgataatatcaagacacctgccgagcgtctgcgggggccgcttccaccctcagccgatgataatctcaagacacctcccttagctactcaggaggctgaggcagaaaaaccacgcaaacccaagaggcagagggcggctgagatggaaccacctcccgaacccaagaggcggagggtcggtgacgtggaaccgtcacgcaaacccaagaggcggagggccgctgacgtggaaccatcatcacccaaacccaagaggcggagggtcggtgatgtggaaccgtcacgcaaacccaagaggcggagggccgctgacgtggaaccatcatcacccgaacccaagaggcggagggtcggtgacgtggaaccgtcacgcaaacccaagaggcggagggccgctgacgtggaaccatcatcacccgaacccaagaggcggaggttgagctgagaagaggccagtgcactcaagcctgagcaataagaataaaaccgagtagaacaaaataaaaaattcaaaaaacaaaacaaaacccacactccaaaaactaacaaagaataaataaataatataaaaataaaataaatactgcagtccttatgttattgctttgtttcgatatctggtatgattgcctgagggacctgaggtttttaatcataggggtttttttttaatctttagaagtggttggttatgtaaaatattattattattttttttgagactggattttgctgtgtc

SEQ ID NO: 673 - DNA, 3786 bp, Homo sapiens
actgggctcactctatcgagaggtcggaggctgcgagtgtcgctgctgaaggctgtagtggaccgggctggatcgcggattctgagctacatcgcgggtttgggggtgcatcttggatttaggggtggatcgctgggtggggagggggatctcgaatttggagctgggtgggggtggaaaggccacgaggagccgcggcgtctcaggagcgggtggtgggcatctgagaagtcgccaccatgaggaagctcctcagttttgggagacgcctgggccaggcgctcctgagctccatggaccaagagtatgcgggtcgggggtaccacattcgggactgggaactgcggaagatccacagggcggccatcaagggcgacgccgcagaggtggagcactgcctgacgcgcaggttccgggacttggacgtccgcgacagaaaagacaggactgttctacatttggcctgtgcccatggccgtgtgcaagtggtcactctcttgctggacagaaaatgccagatcaacatctgtgacagactaaacaggacacctttaatgaaggctgtacactgccaggaagaggcttgtgccattattctcctgaaacgtggcgccaatccaaacattaaggatatctacggcaacactgctctccattatgccgtgtataatgaggggacttcactggcagaaagactgctttcccaccatgcaaatattgaagcactaaacaaggagggaaacactccacttttgtttgctataaattccaggagacagcatatggtggaatttttattgaagaaccaggcaaatatacatgccgttgacaatttcaaaagaacagccctcatacttgcagtacagcataacttgtcaagtatcgtcaccctcctgcttcaacaaaatatacatatctcttctcaagacatgtttggccaaactgccgaggattatgctttttgttgtgatttgagaagcatccaacaacaaattttggaacataaaaataagatgcttaaaaatcatcttcgaaatgacaatcaagaaacagcagctatgaagcctgaaaatttgaaaaaaagaaaaaaaagaaaaaaattgaaaaaaagaaaagaaggtgcaaaagaacacaacttaaaagtggcttcagaggaaaagcaagaaaggcttgaaagaagtgaaaataaacagccgcaggattctcaaagttatggaaaaaagaaggatgagatgtttggaaattttatgttgaagagagacattgccatgctcaaagaggaattatatgcaataaaaaatgacagtctcagaaaggaaaagaaatatattcaggaaattaaaagtattacagaaataaatgctaactttgaaaagagtgtaagactcaatgaagaaatgataacaaaaaaagtggcccagtattcgcaacagcttaatgatctgaaagctgagaatgcaaggctgaattcaaaattggagaaggaaaaacacaacaaagaaagactagaagctgaagttgaatccctccattctaacttggccactgctataaatgagtacaatgaaattttggaaagaaaagacctagaactagttttatggagagcagatgatgtttctagacatgaaacaatgggttctaatatttctcaactaacagataagaatgagttgcttactgaacaggtccataaagctcgggtgaagttcaataccttaaaaggtaagctccgtgagacaagagatgctctcagggaaaagacattggctttagaaagtgtacagctggacctaaagcaagcgcagcatcgaataaaggaaatgaagcagatgcatccaaatggggaagctaaagaaagtcaatccattggaaagcagaactcttcagaggagagaatacgtcaacgagaacttgaaaatctcttgcttgaacgacaactagaggatgctcgtaaggaaggtgataataaagagatagtcattaatatccacagagactgtcttgagaatggaaaggaagatcttctagaagaaagaaataaggaattaatgaatgaatataattatttaaaagaaaaactgcttcagtatgaaaaagaaaaagcagaaagagaagtgattgtgagagaatttcaagaagaactggtcgatcatcttaaaaaattttcaatgtcagagtctccactggaaggtacatcacattgtcatattaatttggatgagacatggacttcaaagaagaaattatttcaagtagaaattcaacctgaagaaaaacatgaagaattcagaaaagtttttgaattaatatcattactgaactatactgcggatcaaataagaaagaaaaatcgtgaattagaagaagaggcaactggatataagaaatgcctagaaatgacaataaatatgttaaatgcatttgcaaatgaagacttcagttgccatggagacttaaatacagaccaactgaaaatggatattctgtttaagaagctaaaacagaagtttgatgatcttatggccgagaaggaagctgtatcttcaaaatgtgtcaatttggccaaagacaatgaagttcttcatcaggagttattatctatgggaaaagtacaagagaaatgtgaaaaacttgagaaggataaaaagatgttggaagaaaaagtattaaatcttaagacacatatggaaaaagatatggtagaacttggtaaagtacaagaatataaatcggagctggatgaaagggcaatgcaggcaatagaaaaattagaagaaatccatttacagaaacaagcagaatatgaaaaacaattagagcagttaaacaaggataatacggcttcactaaaaaagaaggaactcacacttaaagatgtggaatgtaaattctccaaaatgaaaacagcttatgaagatgttacaactgaattagaagagtataaggaagcctttgcagtagcattgaaagctaacagttccatgtcagaaaaaataacgaaatcggataagaaaatagctgtgatcagcaccaagctctttatggagaaagagcggatggaatattttctcagcactcttcctatgaggccagacccagagttaccttgtgttgaaaatcttaatagtatagaactcaacagaaaatatattcccaaaatggccataagaattcctacttcaaacccacagacttcaaataactgcaagaactccttgactgagatggagctggactgtgcagaacaaataattacagaaacaaagaaaacttttgctgcgttgggcccttgctcctatctactttcttctctagaatccactgagttggagccaccgaggaagcacaggcgagctcttcccatcatgcgctcactagtccccaacagaagaaccactgtcgcatccactgagttagagacacacagcagtctctgtgagtggctctgcgtgaaggattgttttctaggtgagatgcacatctcaacacagctgactgctcagactcagcaattccattctgcatctcctctggacacccccaggaccaccaggacaaccccatcatggccctgtcaccaggcccagtctggctccatgataaccaagatgcaggtccagagacaaccgccctacttggtgcctgcatctgaccccccttggtgggtagtgaccagcccaacatggaagaagccagggcagcatgcagccagctgccctgcagccccagatggcacctgggccttgggaagtcattctcaaaggggaagctggaaactttgat

SEQ ID NO: 674 - DNA, 1465 bp, Homo sapiens
actttccgcgcggcggaagagcgcgcgccagcttcggcacacctgggagccggatcccagccctacgcctcgtcccctacaagctcctccaagccccgccggctgctgtgggagcggcggccgtccctctcctggaggtcgtctcctggcatcctcggggccgcaggaaggaagaggaggcagcggccggagccctggtgggcggcctgaggtgagagcccgaccggcccctttgggaatatggcgaccggtggctaccggaccagcagcggcctcggcggcagcaccacagacttcctggaggagtggaaggcgaaacgcgagaagatgcgcgccaagcagaaccccccgggcccggcccccccgggagggggcagcagcgacgccgctgggaagccccccgcgggggctctgggcaccccggcggccgccgctgccaacgagctcaacaacaacctcccgggcggcgcgccggccgcacctgccgtccccggtcccgggggcgtgaactgcgcggtcggctccgccatgctgacgcgggcggcccccggcccgcggcggtcggaggacgagcccccagccgcctctgcctcggctgcaccgccgccccagcgtgacgaggaggagccggacggcgtcccagagaagggcaagagctcgggccccagtgccaggaaaggcaaggggcagatcgagaagaggaagctgcgggagaagcggcgctccaccggcgtggtcaacatccctgccgcagagtgcttagatgagtacgaagatgatgaagcagggcagaaagagcggaaacgagaagatgcaattacacaacagaacactattcagaatgaagctgtaaacttactagatccaggcagttcctatctgctacaggagccacctagaacagtttcaggcagatataaaaggaagagagataaaccctacacagagcaaggagctgttacgaggagtgggagtgttggagggtgaagagaatggggcagtgaaagatactaaaaggatggaagccagttaagtagttgttggttatttgggaatttcagaatatatcctgtacttctgaatatttgatacttattctaaaagtaggatttacccttgagtcttgtatttcttctcattgctaagctttataatgtctattttagtggaaaattcctctagctataatctcttaatgctgccaatctcattctcatgatagttttagaataatagtgtaattttccccaacacaacaccccctggtgtttctacataagatgcgaaaattcccagagggggaaaacttccagtaaggggtggcatttatctttgatgatactgtttcttttcccttttctgagcattatagttcatgtctttgtagctaagagtggagggaggattctttttggatcgtattagagatttatgttaacattcctaagtaaaatgttaaaaactt

SEQ ID NO: 675 - DNA, 5336 bp, Homo sapiens
agacttccgcccggcgcggagaccgaaggctggcggctggtcgcgttgcaggcaacatgtcggaaggaaacgccgccggcgagcccagcacgccgggagggccccgacctctcctgactggggcccgggggctcatcgggcggcggccggcgcctcccctcacccccggccgccttccctccatccgttccagggacctcaccctcgggggagtcaagaagaaaaccttcaccccaaatatcatcagtcggaagatcaaggaagagcccaaggaagaagtaactgtcaagaaggagaagcgtgaaagggacagagaccgacaacgagaggggcatggacgagggcgaggccgtccagaagtgatccagtctcactccatctttgagcagggcccagctgaaatgatgaagaaaaaagggaactgggataagacagtggatgtgtcagacatgggaccttctcatatcatcaacatcaaaaaagagaagagagagacagacgaagaaactaaacagatcttgcgtatgctggagaaggacgatttcctcgatgaccccggcctgaggaacgacactcgaaatatgcctgtgcagctgccgctggctcactcaggatggctttttaaggaagaaaatgacgaaccagatgttaaaccttggctggctggccccaaggaagaggacatggaggtggacatacctgctgtgaaagtgaaagaggagccacgagatgaggaggaagaggccaagatgaaggctcctcccaaagcagccaggaagactccaggcctcccgaaggatgtatctgtggcagagctgctgagggagctgagcctcaccaaggaagaggaactgctgtttctgcagctgccagacaccctccctggccagccacccacccaggacatcaagcctatcaagacagaggtgcagggcgaggacggacaggtggtgctcatcaagcaggagaaagaccgagaagccaaattggcagagaatgcttgtaccctggctgacctgacagagggtcaggttggcaagctactcatccgcaagtctggaagggtgcaactcctcttgggcaaggtgactctggacgtgaccatgggaactgcctgctccttcctgcaggagctggtgtccgtgggccttggagacagtaggacaggggagatgacagtcctgggacacgtgaagcacaaacttgtatgttcccctgattttgaatccctcttggatcacaaacaccggtaaaatgagcaggtggaggaggacggcgcctgtgcccacggctgctgcctgctccagacattttgttcttgaatctgtgagacccagaaggggcccactgagcccactcactccagcctttggcaaccattgttccaggtcccccagggcttcctcccacagcagctgtgaatggcacagtgaccttcctgcagcgtggagatggcacatccttgctgctggggacttggccctgctatttatttttgtatttatgtcttaatctcttccactgatgcatcctccaagggtagatggggagggtctgtgtgaaggggccggcttctcttggtgcctgctgggttgcaggggcaggaagcgtgtggactgcagcttctgctggtgctccccccgtcctcctggaggcagtataggagagagagcaaggattgagtctgagacttaagcactcggtcccagcttgccagttcctggttctgtgtccttggacaaactacctaacctttctgagcctcctatacctcatccgacacaaatggggatgatacctacctccagggttggcgtgaggattcatgggctattatagatgaaaactgcacaaggccagaaccagcaggcactcaataaacgttcatgtcctttttctctacctgagtctattttcaaacaaaatagagattctaaatctcccagaagcagcgactagagctgctcccgtccccactcttgccccttcctgctttatatcccgtcctcaccctgggcctgatgccctaaatttatggtgtcagattgttctatgcctttttctcctggctcctgttagccaggtgcctcctgtgtgagttactgtaatagctgcaggtaatagaaaggaagaagtcagagacccctcccagcaccctacaaaagcctttgggggacatgttgggcccaggacatgttccctgcactctttcctttgcagttagtactcatgtatgagccgaagtcatatattgctaacaaaaaaactaaatccttcataagagaagttagggatgtattgaataatggcctctttgacacttggccgatgatgcccacttcaaaaactttgggtttcagaggcctgcccgtctcctgtcctagcactgccagagccacctactcagtgttacttttttgggtctgtgatcctgttccctttaccaggtcattgtactgtgttgtccctggaggaacagcttctcctcttgtcttgacagtagggctggggttttccctggttcagctggggagacgtttgcaggttagaaaaaggtctcatgcggcagcgtgtgtggctgttagacgctgatggcacaacttccctttgctggcgtcgtggcacctggcctctgggacagtatgaaccataggggctcaggaagaaccgcttcccctccacccccatccctgattcctagtggccccttagattttgggtacatcttccttcaggctcaccttccttcttttcaaagttcctcaagcctgttactcatttgtcaaggctgggcttctcctacaaagccctcaacctgcccagccagcagctgtgaggctgactgaatatttggtgaccatatcaccctttctggtgctgaagctcatgtcagctccattggacagtgttattctgggctcttctcactgtagaggactggagcagaaagggttccttggaaacctgtgctgggaagccctgtttggtctaaggctaagctttggttaactctgggctccagccctttcttcctttaaatagctgatgcacggccagcaggtctccattctcatcctctctttctattctgtttctttggttcagaaatactcttctgctttttttggacgaactcaatggcccgatgttagatattgggtatttttcaatcttctgttttctgacccttccaagaaagtttgaggaagaacatgtactgctttcacgttcatttcgcccattcagatgtcttggcttgaaccttatgactccgtatcaaagtcctcacaacctgtctcagatccctgatgcacaaattaggtcttattaataagtgtgggaaaagagaggagagtccaccttcttggtcaggcccctgaggcatgcatttctaccaaggaatatggacagatgacagaggagaagagcccaaagccaaatttatacatgagtgcaagtggatgcaaatttgttgctccctgcatctgtgtatatgctttctgttaaatacagaaagaaggaacaataggcttgcacacttttctaactacatgtttaagtggcagagtccaggctgtcgagtcacggttgggtttgaatctgactccaccagtaactttggttggaaaaaatcacttatcctctttaagcttgattttatttattttattttatgtaagagtgagacagtagtagcttaatagggttgcttttaaattagagtgaacatgaggcatttattcggtgccagacagataactgcctataacaggatgtgatcagcacaagtaacagaaaattagcctgacggtggcttaagcaatgggaatgtttatctcacatagcaaaaagtctgtaaatagatggttctagagttgggtggaagccaaaatgtcatcaggatttccttggaaccgtctgctttgccatcctcagtattgcagaatggctgctcctgcgccaagcatcattctgcaaatgatggtgtccacagccagagtggacagtagtacaggagccttctcattctgcccttatccgggaataaccgtcagcagctccagcaacctcccccctgtctctttatagagtggggccacgtgcccactcttggaccaggccctggcaaagggggatgggtcgactagtgtatcccctggcactgagcacacttgcccttgagctggggttttgttagtagggaggaagctggagtggcagttggatagacaattcatagtagctgctgccatgttcaaaaaatgctgcaatgtaaaatcataaagtattcatctaggcataactttttaaaatattcagtcaccttttattctactaaaatcaattttaacattttagtgtatattattttattttagattcagcaggtacatgagcatgttagttttgttttgttttgttttgttctgttttgttttttgagatggagtctcactctgtcgcccagtggtgtgatcttggcttactgcaactctgtctcccaggttcaagtgatcctcccgcctcagccccccagatagctgggattacaggcacatgccaccacacctggctaatttttgtatttttagtagagacgggagtttcaccatgttggccaggctggtctcaaactcctcacctcaagtgatctacctgcctcagcctcccaagtgctgggattacaggcgtgagccactgcgcccagccacatgtgcgtgtttgtgtatattgcgtactggtggggattgggcttctgtcatacctatcacccaaatagtgaacattgtactcaggtagcatttcaacccttgccccccctcccactcacccccttttggagtgcccagtgtttgctatttccatctttatgtccataggtacccattatttagctcccacttataagtgagaacatgtgctatttgattttctgtttccgaggttaggataattacctcaagctccatccatgtggctgcaaagcacatgatttcattgtattttatgactgctcatgtatattatttcagcctccaaaattttgtatgttatttataatgatataaattatgtggttttatcgtgtactctatctcactcagaaatacatacaattcttcgttcccagctactctggagctgaggtgggaggatcacttgagcccaggagttcaagaccagcctgggcaacatggtgaaaccttgtctctgaaaaataaataatacacacccacatgcacacacatccagttcttccatgttaatgagtatgttgtgtttcacatacttctgaattagccgaaggaattaaaggtagcatcttttaatcctca

SEQ ID NO: 676 - DNA, 2394 bp, Homo sapiens
gagtctgccgccgccgcagcgcctccgctccgccaactccgccggcttaaattggactcctagatccgcgagggcgcggcgcagccgagcagcggctctttcagcattggcaaccccaggggccaatatttcccacttagccacagctccagcatcctctctgtgggctgttcaccaactgtacaaccaccatttcactgtggacattactccctcttacagatatgggagacatgggagatccaccaaaaaaaaaacgtctgatttccctatgtgttggttgcggcaatcagattcacgatcagtatattctgagggtttctccggatttggaatggcatgcggcatgtttgaaatgtgcggagtgtaatcagtatttggacgagagctgtacatgctttgttagggatgggaaaacctactgtaaaagagattatatcaggttgtacgggatcaaatgcgccaagtgcagcatcggcttcagcaagaacgacttcgtgatgcgtgcccgctccaaggtgtatcacatcgagtgtttccgctgtgtggcctgcagccgccagctcatccctggggacgaatttgcgcttcgggaggacggtctcttctgccgagcagaccacgatgtggtggagagggccagtctaggcgctggcgacccgctcagtcccctgcatccagcgcggccactgcaaatggcagcggagcccatctccgccaggcagccagccctgcggccccacgtccacaagcagccggagaagaccacccgcgtgcggactgtgctgaacgagaagcagctgcacaccttgcggacctgctacgccgcaaacccgcggccagatgcgctcatgaaggagcaactggtagagatgacgggcctcagtccccgtgtgatccgggtctggtttcaaaacaagcggtgcaaggacaagaagcgaagcatcatgatgaagcaactccagcagcagcagcccaatgacaaaactaatatccaggggatgacaggaactcccatggtggctgccagtccagagagacacgacggtggcttacaggctaacccagtggaagtacaaagttaccagccaccttggaaagtactgagcgacttcgccttgcagagtgacatagatcagcctgcttttcagcaactggtcaatttttcagaaggaggaccgggctctaattccactggcagtgaagtagcatcaatgtcctctcaacttccagatacacctaacagcatggtagccagtcctattgaggcatgaggaacattcattctgtattttttttccctgttggagaaagtgggaaattataatgtcgaactctgaaacaaaagtatttaacgacccagtcaatgaaaactgaatcaagaaatgaatgctccatgaaatgcacgaagtctgttttaatgacaaggtgatatggtagcaacactgtgaagacaatcatgggattttactagaattaaacaacaaacaaaacgcaaaacccagtatatgctattcaatgatcttagaagtactgaaaaaaaaagacgtttttaaaacgtagaggatttatattcaaggatctcaaagaaagcattttcatttcactgcacatctagagaaaaacaaaaatagaaaattttctagtccatcctaatctgaatggtgctgtttctatattggtcattgccttgccaaacaggagctccagcaaaagcgcaggaagagagactggcctccttggctgaaagagtcctttcaggaaggtggagctgcattggtttgatatgtttaaagttgactttaacaaggggttaattgaaatcctgggtctcttggcctgtcctgtagctggtttattttttactttgccccctccccactttttttgagatccatcctttatcaagaagtctgaagcgactataaaggtttttgaattcagatttaaaaaccaacttataaagcattgcaacaaggttacctctattttgccacaagcgtctcgggattgtgtttgacttgtgtctgtccaagaacttttcccccaaagatgtgtatagttattggttaaaatgactgttttctctctctatggaaataaaaaggaaaaaaaaaaaggaaactttttttgtttgctcttgcattgcaaaaattataaagtaatttattatttattgtcggaagacttgccacttttcatgtcatttgacattttttgtttgctgaagtgaaaaaaaaagataaaggttgtacggtggtctttgaattatatgtctaattctatgtgttttgtctttttcttaaatattatgtgaaatcaaagcgccatatgtagaattatatcttcaggactatttcactaataaacatttggcatagataaataaataaa

SEQ ID NO: 677 - DNA, 3317 bp, Homo sapiens
aattccggaaggtgctgcacagctgtggcggcgggtactgcgttagtgattagagtttcttccctgccggaggtgggatacacggtagcatcatggtcgaggaggtacagaaacattctgtacacacccttgtgttcaggtcgttgaagaggacccatgacatgtttgtagctgataatggaaaacctgtgcctttagatgaagagagtcacaaacgaaaaatggcaatcaagcttcgtaatgagtatggtcctgtgttgcatatgcctacttcaaaagaaaatcttaaagagaagggtcctcagaatgcaacggattcatatgttcataaacagtaccctgccaatcaaggacaagaagttgaatactttgtggcaggtacacatccatacccaccaggacctggggttgctttgacagcagatactaagatccagagaatgccaagtgaatcagctgcacagtccttagcggtggcattacctttgcagaccaaggctgatgcaaatcgtactgcccctagtggaagtgaataccgacatcctggggcttctgaccgtccacagcctacagcgatgaattcaattgtcatggagactggcaataccaagaactctgcactgatggctaaaaaagcccctacaatgccaaaaccccagtggcacccaccgtggaaactctacagggttatcagtgggcatcttggctgggttcgatgtattgctgtggaacctggaaatcagtggtttgttactggatctgctgacagaactataaagatctgggacttggctagtggcaaattaaaactgtcattgactgggcatattagtactgtgcggggcgtgatagtaagcacaaggagcccatatctgttctcttgtggagaagacaaacaagtgaaatgctgggatctcgaatacaataaggttatacggcattatcatggacatttaagtgcagtgtatggtttggatttgcacccgacaatcgatgtgttggtaacctgtagtcgagattcaactgcacggatttgggatgtgagaactaaagccagtgtacacacattatctggacatacaaatgcagttgctacagtgagatgtcaggctgcagaaccacaaattattacaggaagccatgatactacaattcgattatgggatctggtggctggaaaaacaagagtgacattaacaaatcacaaaaaatcagttagggctgtggttttacatccaagacattacacatttgcatctggttctccagataacataaagcagtggaaattccctgatggaagtttcattcaaaatctttccggtcataatgctattattaacacattgacggtaaattctgatggagtgcttgtatctggagctgacaatggcaccatgcatctttgggactggagaactggctacaattttcagagagttcacgcagctgtgcaacctgggtctttggacagtgaatcaggaatatttgcttgtgcttttgatcagtctgaaagtcgattactaacagctgaagctgataaaaccattaaagtatacagagaggatgacacagccacagaagaaactcatccagtcagctggaaaccagaaattatcaagagaaagagattttaatgaatgtggaattttttctctctctttttttttctttttaattaaaaaaaaaaaagcttggcgttcatgaggatatccagtcattttgtgctctggctgggaatataaaggagaaattcacttgcttcaatcattgctgcttcatattttacaataaactgtcccctgtcccctacccctgtgtttttatttctaaaacaatttgtgatactaggaagatgcagatatcaagtaaatgcaggtttattgaacataactattctagatgtaatattttgacagtcttattagaaaacccccttttttaaaaaaaatgtatgaaaccgataattaggacatttgaaggagcagtagtttttttttagtcctttaaaaaataacatctgtgactaataatttgagattaaaagatttgaagtcttaatttatgtatgtttattccaaaaacagtttttgagtgtatgttctacaaagttctgcactagatactgttcaggaaatagacaagtaagatgtgtctatcctctaagacttccagtttggtagcttagtatagaaattctgtaacagaggtgcaggtgaaatgctgggggaacagaagggataagaccatttatttttctcaggaaggattgtggaagacttcatagagtaagtggcattggagattaccttgaagtgaaggaagacaaagaaggaaaagagatgaggcataaagtgatgaaaccaggcacaagaaagtgtgcggtgtgttctgggacaaagaatgttctgctactgtcgaataatgggactaaagctggcttgttctggggaaagctcatataagtatggattttattcctcaactagtaggataccaatactggtattgaaacttggggaaaataactggagataccagtgcagctatttaaagctgtagcaagggctgcaatcttgcggagattttaaagagaagttttaaagtttctaatactgatgcctctttttggtaaatacaagttttataaatcctgccctgggatcctgattccccattaatcaagatttgtcagacttcaccttctataattagaaaacacagttataagaacagtcaattttttaaattttccaaattaaaaaattgcaccatgattttgaacaagcacttccaattacattacccatcttgtatgccataggtgggagtataattgtcacagcctttaggaatgtagttttctgggatttattgaaactttgaaccttttggcctactaagttcattcctaggaaactgcctaatgggaatgatctgacaagtgtacacaagcaaagtcattgcacctttgttctttaatacttaaaactagcccaaatgccctgtcagtaagggactggtttaatagatggtacctttatgcaatttgtttctaagtattcgttaagagagtgaggaatgtctggattattagggcaagatttctaaacttgggtaaaaaaaaaagttgtgcaagcatttttgtggacaacttgatgctctaaaatataagtaacaccacattactaacagtggctttgttaggaagcagaattatggaagaactttcatgggtggctttacatatttctataatgttttaattttctataagcatgtatttcgtaaacttaaataaagaaaaaagaacacta

SEQ ID NO: 678 - DNA, 1822 bp, Homo sapiens
agaaaggaacacagtaaactgaattgatccgtttagaagtttacaatgaagtttcttctaatactgctcctgcaggccactgcttctggagctcttcccctgaacagctctacaagcctggaaaaaaataatgtgctatttggtgaaagatacttagaaaaattttatggccttgagataaacaaacttccagtgacaaaaatgaaatatagtggaaacttaatgaaggaaaaaatccaagaaatgcagcacttcttgggtctgaaagtgaccgggcaactggacacatctaccctggagatgatgcacgcacctcgatgtggagtccccgatgtccatcatttcagggaaatgccaggggggcccgtatggaggaaacattatatcacctacagaatcaataattacacacctgacatgaaccgtgaggatgttgactacgcaatccggaaagctttccaagtatggagtaatgttacccccttgaaattcagcaagattaacacaggcatggctgacattttggtggtttttgcccgtggagctcatggagacttccatgcttttgatggcaaaggtggaatcctagcccatgcttttggacctggatctggcattggaggggatgcacatttcgatgaggacgaattctggactacacattcaggaggcacaaacttgttcctcactgctgttcacgagattggccattccttaggtcttggccattctagtgatccaaaggccgtaatgttccccacctacaaatatgttgacatcaacacatttcgcctctctgctgatgacatacgtggcattcagtccctgtatggagacccaaaagagaaccaacgcttgccaaatcctgacaattcagaaccagctctctgtgaccccaatttgagttttgatgctgtcactaccgtgggaaataagatctttttcttcaaagacaggttcttctggctgaaggtttctgagagaccaaagaccagtgttaatttaatttcttccttatggccaaccttgccatctggcattgaagctgcttatgaaattgaagccagaaatcaagtttttctttttaaagatgacaaatactggttaattagcaatttaagaccagagccaaattatcccaagagcatacattcttttggttttcctaactttgtgaaaaaaattgatgcagctgtttttaacccacgtttttataggacctacttctttgtagataaccagtattggaggtatgatgaaaggagacagatgatggaccctggttatcccaaactgattaccaagaacttccaaggaatcgggcctaaaattgatgcagtcttctactctaaaaacaaatactactatttcttccaaggatctaaccaatttgaatatgacttcctactccaacgtatcaccaaaacactgaaaagcaatagctggtttggttgttagaaatggtgtaattaatggtttttgttagttcacttcagcttaataagtatttattgcatatttgctatgtcctcagtgtaccactacttagagatatgtatcataaaaataaaatctgtaaaccataggtaatgattatataaaatacataatatttttcaattttgaaaactctaattgtccattcttgcttgactctactattaagtttgaaaatagttaccttcaaaggccaagagaattctatttgaagcatgctctgtaagttgcttcctaacatccttggactgagaaattatacttacttctggcataactaaaattaagtatatatattttggctcaaataaaattgaaaaaaaaa

SEQ ID NO: 679 - DNA, 486 bp, Homo sapiens
gtacctgtctataaggagtcctgcttatcacaatgaatgttctcctgggcagcgttgtgatctttgccaccttcgtgactttatgcaatgcatcatgctatttcatacctaatgagggagttccaggagattcaaccaggaaatgcatggatctcaaaggaaacaaacacccaataaactcggagtggcagactgacaactgtgagacatgcacttgctacgaaacagaaatttcatgttgcacccttgtttctacacctgtgggttatgacaaagacaactgccaaagaatcttcaagaaggaggactgcaagtatatcgtggtggagaagaaggacccaaaaaagacctgttctgtcagtgaatggataatctaatgtgcttctagtaggcacagggctcccaggccaggcctcattctcctctggcctctaatagtcaatgattgtgtagccatgcctatcagtaaaaagatttttgagcaaa

SEQ ID NO: 680 - DNA, 3562 bp, Homo sapiens
actcgccggcactcgcccggctcgcccgctttcgcacccagttcacgcgccacagctatgtgtccccgagccgcgcgggcgcccgcgacgctactcctcgccctgggcgcggtgctgtggcctgcggctggcgcctgggagcttacgattttgcacaccaacgacgtgcacagccggctggagcagaccagcgaggactccagcaagtgcgtcaacgccagccgctgcatgggtggcgtggctcggctcttcaccaaggttcagcagatccgccgcgccgaacccaacgtgctgctgctggacgccggcgaccagtaccagggcactatctggttcaccgtgtacaagggcgccgaggtggcgcacttcatgaacgccctgcgctacgatgccatggcactgggaaatcatgaatttgataatggtgtggaaggactgatcgagccactcctcaaagaggccaaatttccaattctgagtgcaaacattaaagcaaaggggccactagcatctcaaatatcaggactttatttgccatataaagttcttcctgttggtgatgaagttgtgggaatcgttggatacacttccaaagaaaccccttttctctcaaatccagggacaaatttagtgtttgaagatgaaatcactgcattacaacctgaagtagataagttaaaaactctaaatgtgaacaaaattattgcactgggacattcgggttttgaaatggataaactcatcgctcagaaagtgaggggtgtggacgtcgtggtgggaggacactccaacacatttctttacacaggcaatccaccttccaaagaggtgcctgctgggaagtacccattcatagtcacttctgatgatgggcggaaggttcctgtagtccaggcctatgcttttggcaaatacctaggctatctgaagatcgagtttgatgaaagaggaaacgtcatctcttcccatggaaatcccattcttctaaacagcagcattcctgaagatccaagcataaaagcagacattaacaaatggaggataaaattggataattattctacccaggaattagggaaaacaattgtctatctggatggctcctctcaatcatgccgctttagagaatgcaacatgggcaacctgatttgtgatgcaatgattaacaacaacctgagacacacggatgaaatgttctggaaccacgtatccatgtgcattttaaatggaggtggtatccggtcgcccattgatgaacgcaacaatggcacaattacctgggagaacctggctgctgtattgccctttggaggcacatttgacctagtccagttaaaaggttccaccctgaagaaggcctttgagcatagcgtgcaccgctacggccagtccactggagagttcctgcaggtgggcggaatccatgtggtgtatgatctttcccgaaaacctggagacagagtagtcaaattagatgttctttgcaccaagtgtcgagtgcccagttatgaccctctcaaaatggacgaggtatataaggtgatcctcccaaacttcctggccaatggtggagatgggttccagatgataaaagatgaattattaagacatgactctggtgaccaagatatcaacgtggtttctacatatatctccaaaatgaaagtaatttatccagcagttgaaggtcggatcaagttttccacaggaagtcactgccatggaagcttttctttaatatttctttcactttgggcagtgatctttgttttataccaatagccaaaaattctccttgcctttaatgtgtgaaactgcattttttcaagtgagattcaaatctgccttttaggacctggctttgtgacagcaaaaaccatctttacaggctcctagaagctgaaggttagagcattataaaatgaagagacagacatgattactcagggtcagcaacctagtgagttagaaaaaaaattaacatagggccctataaggagaaagccaactatgttaagtttacgtgtccaaattttaatgaaattttactaacaattttaaaccatatttttcttcttcatatccatttctaatccatcaaacagcttatgtttacataaaattttatcattcacaaggaagttttaagcacactgtctcatttgatatccacaacttatttttggtaggaaagagagatgtttttcccacctgtcagatgaaaaaactgaagctcaaaaagggttgacttgaccatacagctaatgctgacagatccaagacctagacctaggtcttttgaactcaagtccagcattctcaactatatcaagttactgttcagaatacttaatatctcctctcttcataattatcaatagccccaagctcatggatgacaaatctctgctttatttcttgtctctattttttcactttatagctcctgttataatagcaagtttaatggtataaacacaggataccatcctctcttgcaacacccatgtgcctttgatgagtcaggtagcaagctgtagtagataatgagaaaggccagaggctgcaaaagacagtcaaaggacacgagagaaaggaaggggaagaacaggactccaggactgttttatattatagaaaagcaagagctaaagagcatttacacatgttaaacagatacttgttaagcatagtgcctgacacacggcattagctgttattttatgagattccatcagctctgcctctgtcctctttcttctaacatgaaggtatcatgagaagagaaccttctaacataagctgtaattctaaacctgcacttgtccctctccagcaagaggctagcactgaattcattctactcatactacacacccagttatggaatgtccagagttctcgaagaaaataaatgactttaggaagaggtatacattttttaagtcgctctgcctccaaatctgaacagtcactgtaaatcattcttaagcccagatatgagaacttctgctggaaagtgggaccctctgagtgggtggtcagaaaatacccatgctgatgaaatgacctatgcccaaagaacaaatacttaacgtgggagtggaaccacatgagcctgctcagctctgcataagtaattcaagaaatgggaggcttcaccttaaaaacagtgtgcaaatggcagctagaggttttgataggaagtatgtttgtttcttagtgtttacaaatattaagtactcttgatacaaaatatacttttaaacttcataacctttttataaaagttgttgcagcaaaataatagcctcggttctatgcatatatggattagctataaaaaatgtcaataagattgtacaaggaaaattagagaaagtcacatttagggtttattttttacacttggccagtaaaatagggtaaatcctattagaattttttaaagaactttttttaagtttcctaaatctgtgtgtgtattgtgaagtggtataagaaatgactttgaaccactttgcaattgtagattcccaacaataaaattgaagataagctc

SEQ ID NO: 681 - DNA, 1956 bp, Homo sapiens
gcggattctggacttgggcgccaactcgtagtccacgctccccggggtcagcagaggggcgctcacgctctcgccacccacctcgctttctcaccccgcgcttcccggcctgggtttttagtcttccttggagcgctctctggcctccgcctccgccagggagcggaaggcggagacagcgagactggccaggggggaggaaagaggacgcgtgtgggcaagggggacaacgggatgtccacgggctcggtgagtgatccggaggagatggagcttcgggggctgcagcgggagtacccggtccccgcctccaagaggccgcccctccgcggcgtagagcgcagctacgcctcgcccagtgacaactcgtcggcagaggaggaggaccccgacggcgaggaggagcgctgcgctctgggcacagccggcagcgcggaaggctgcaagaggaagcggccccgtgtggctgggggcggcggcgcaggtggtagcgcgggcggtggtggcaagaagcccctcccggccaagggctcagccgcagagtgcaagcagtcgcagcggaacgcggccaacgcccgtgagcgtgcccggatgcgcgtgctgagcaaagccttctccaggctcaagaccagcctgccctgggtgccccccgacactaagctctccaagctggacacgctccggctggcttccagttacatcgctcacctgcggcagctgttgcaggaggaccgctatgagaacggctacgtgcacccagtgaacctgacatggccattcgtggtctcgggaagaccggactctgacaccaaagaagtttccgcagccaacagactatgtggaaccaccgcttaaatcggactggaactcacttgatgggattattcgttaaatgcgagtgtttgggggccacggagagaagggagagctcgtgagatgggaagaagtttccgctggattctccttgacccttcccctttccctggaactgtgatcgtgacaggtggcgggtgtggctgtcactgcacagcgcccacggctacagctgcgccggatctgggcgaccacgttttgcctctccaaaaagagcttcctttcgtgacgagacgcggacgcaggtccaccctcgggccctagctctgtagactaactctcggctgctgccccagcccgcgccagacagcccacggatccgttctcagcggagccagattcatcgcacacgtgcgggacggttccacacagccccggcctttcgcggtgacacaatggttagggaacggttagaacgcgctctacatccgctttaaagacagaggtctagacgtgagatccgcgtcgggacagggttttaagtgacaaagaagggcgagtggcttctctgggccgggttcgtactccagcacagcgcccttctaacgggcgggaggaaggccgctgctcgcagggctaggtggagacacacttcccagatcaccgcaggcgggttttacccggagagctctgggccgttcggcctccctgccgggtggcttcttcaatcccgtctccttcccaagctcccggctttttctaatcaggcaggcgtctgtcaaccctctccacttctgggctgaagcctccccaagccccgctgcgccaacctgtgtggggtcttcttcgggcctccctctccgccccgctcctgctcctacctgcagcacccccagctccgactccagactctctgcatcaggtctccccactccacgctccgggcgccccaactccaacaccacgtcctgccgcgcaggttcttccccgcgcggaggagcgcgcagggtgggcggcttaccatagcaagtgatcctgcgatagggaacgcgcccttgccccgaggctgcactaccacaggaaataacatatgtaaataaatttatttttttatgaataataaaacgcgctgtaaaaaccgtg

SEQ ID NO: 682 - DNA, 1537 bp, Homo sapiens
caaagtgctctgtatcctccagtctccgcgcctccacccagctcaggaacccgcgaaccctctcttgaccactatgagcctcccgtccagccgcgcggcccgtgtcccgggtccttcgggctccttgtgcgcgctgctcgcgctgctgctcctgctgacgccgccggggcccctcgccagcgctggtcctgtctctgctgtgctgacagagctgcgttgcacttgtttacgcgttacgctgagagtaaaccccaaaacgattggtaaactgcaggtgttccccgcaggcccgcagtgctccaaggtggaagtggtagcctccctgaagaacgggaagcaagtttgtctggacccggaagccccttttctaaagaaagtcatccagaaaattttggacagtggaaacaagaaaaactgagtaacaaaaaagaccatgcatcataaaattgcccagtcttcagcggagcagttttctggagatccctggacccagtaagaataagaaggaagggttggtttttttccattttctacatggattccctactttgaagagtgtgggggaaagcctacgcttctccctgaagtttacagctcagctaatgaagtactaatatagtatttccactatttactgttattttacctgataagttattgaaccctttggcaattgaccatattgtgagcaaagaatcactggttattagtctttcaatgaatattgaattgaagataactattgtatttctatcatacattccttaaagtcttaccgaaaaggctgtggatttcgtatggaaataatgttttattagtgtgctgttgagggaggtatcctgttgttcttactcactcttctcataaaataggaaatattttagttctgtttcttggggaatatgttactctttaccctaggatgctatttaagttgtactgtattagaacactgggtgtgtcataccgttatctgtgcagaatatatttccttattcagaatttctaaaaatttaagttctgtaagggctaatatattctcttcctatggttttagacgtttgatgtcttcttagtatggcataatgtcatgatttactcattaaactttgattttgtatgctattttttcactataggatgactataattctggtcactaaatatacactttagatagatgaagaagcccaaaaacagataaattcctgattgctaatttacatagaaatgtattctcttggttttttaaataaaagcaaaattaacaatgatctgtgctctgaaagttttgaaaatatatttgaacaatttgaatataaattcatcatttagtcctcaaaatatatatagcattgctaagattttcagatatctattgtggatcttttaaaggttttgaccattttgttatgaggaattatacatgtatcacattcactatattaaaattgcacttttattttttcctgtgtgtcatgttggtttttggtacttgtattgtcatttggagaaacaataaaagatttctaaacca

SEQ ID NO: 683 - DNA, 492 bp, Homo sapiens
atccctgactcggggtcgcctttggagcagagaggaggcaatggccaccatggagaacaaggtgatctgcgccctggtcctggtgtccatgctggccctcggcaccctggccgaggcccagacagagacgtgtacagtggccccccgtgaaagacagaattgtggttttcctggtgtcacgccctcccagtgtgcaaataagggctgctgtttcgacgacaccgttcgtggggtcccctggtgcttctatcctaataccatcgacgtccctccagaagaggagtgtgaattttagacacttctgcagggatctgcctgcatcctgacgcggtgccgtccccagcacggtgattagtcccagagctcggctgccacctccaccggacacctcagacacgcttctgcagctgtgcctcggctcacaacacagattgactgctctgactttgactactcaaaattggcctaaaaattaaaagagatcgatattaa

SEQ ID NO: 684 - DNA, 867 bp, Homo sapiens
gagtcctgagctgcgtcccggagcccacggtggtcatggctgccagagcgctctgcatgctggggctggtcctggccttgctgtcctccagctctgctgaggagtacgtgggcctgtctgcaaaccagtgtgccgtgccagccaaggacagggtggactgcggctacccccatgtcacccccaaggagtgcaacaaccggggctgctgctttgactccaggatccctggagtgccttggtgtttcaagcccctgcaggaagcagaatgcaccttctgaggcacctccagctgcccccggccgggggatgcgaggctcggagcacccttgcccggctgtgattgctgccaggcactgttcatctcagcttttctgtccctttgctcccggcaagcgcttctgctgaaagttcatatctggagcctgatgtcttaacgaataaaggtcccatgctccacccgaggacagttcttcgtgcctgagactttctgaggttgtgctttatttctgctgcgtcgtgggagagggcgggagggtgtcaggggagagtctgcccaggcctcaagggcaggaaaagactccctaaggagctgcagtgcatgcaaggatattttgaatccagactggcacccacgtcacaggaaagcctaggaacactgtaagtgccgcttcctcgggaaagcagaaaaaatacatttcaggtagaagttttcaaaaatcacaagtctttcttggtgaagacagcaagccaataaaactgtcttccaaagtggtcctttatttcacaaccactctcgctactgttcaatacttgtactattcctgggttttgtttctttgtacagtaaacattatgaacaaacaggca

SEQ ID NO: 685 - DNA, 1216 bp, Homo sapiens
ggcagctgcacggctcctggccccggagcatgcgcgagagccgccccggagcgccccggagccccccgccgtcccgcccgcggcgtcccgcgccccgccgccagcgcacccccggacgctatggcccacccctccggctggccccttctgtaggatggtagcacacaaccaggtggcagccgacaatgcagtctccacagcagcagagccccgacggcggccagaaccttcctcctcttcctcctcctcgcccgcggcccccgcgcgcccgcggccgtgccccgcggtcccggccccggcccccggcgacacgcacttccgcacattccgttcgcacgccgattaccggcgcatcacgcgcgccagcgcgctcctggacgcctgcggattctactgggggcccctgagcgtgcacggggcgcacgagcggctgcgcgccgagcccgtgggcaccttcctggtgcgcgacagccgccagcggaactgctttttcgcccttagcgtgaagatggcctcgggacccacgagcatccgcgtgcactttcaggccggccgctttcacctggatggcagccgcgagagcttcgactgcctcttcgagctgctggagcactacgtggcggcgccgcgccgcatgctgggggccccgctgcgccagcgccgcgtgcggccgctgcaggagctgtgccgccagcgcatcgtggccaccgtgggccgcgagaacctggctcgcatccccctcaaccccgtcctccgcgactacctgagctccttccccttccagatttgaccggcagcgcccgccgtgcacgcagcattaactgggatgccgtgttattttgttattacttgcctggaaccatgtgggtaccctccccggcctgggttggagggagcggatgggtgtaggggcgaggcgcctcccgccctcggctggagacgaggccgcagaccccttctcacctcttgagggggtcctccccctcctggtgctccctctgggtccccctggttgttgtagcagcttaactgtatctggagccaggacctgaactcgcacctcctacctcttcatgtttacatatacccagtatctttgcacaaaccaggggttgggggagggtctctggctttatttttctgctgtgcagaatcctattttatattttttaaagtcagtttaggtaataaactttattatgaaagtttttttttt

SEQ ID NO: 686 - DNA, 1689 bp, Homo sapiens
ctcagctgccttgcacagcctcgcaatgagctgccacaactgctccgacccccaggtcctttgcagctccgggcagctgttcctgcagcccctctgggaccacctgaggagctgggaggccctcctacagtcgcccttcttcccggtcatcttctccatcaccacatacgtgggcttttgcctgcccttcgtggtcctggatatcctgtgctcctgggtgcccgccctgcggcgctacaagatccaccctgacttctcgccatccgcgcagcagctgctaccttgcctggggcagaccctctaccagcatgtgatgtttgtgttccccgtgacgctgctgcattgggcccgcagcccggccctcctgccccacgaagctcccgagctgctcctgctgctgcaccacatcctgttctgcctgctactcttcgacatggagttcttcgtgtggcacctgctgcaccacaaggtgccctggctgtaccgcaccttccacaaggtgcaccaccagaactcgtcctcgttcgcgctggcaacgcagtatatgagcgtctgggaactgttttctttgggcttcttcgacatgatgaacgtcacactgctcgggtgccacccgctcaccaccctgaccttccacgtggtcaacatctggctttccgtggaggaccactccggctacaacttcccttggtccactcacagactggtgcccttcgggtggtacgggggtgtggtgcaccacgacctgcatcactctcactttaactgcaacttcgctccgtactttacacactgggacaaaatactgggaacgctgcggactgcatctgtcccagcgcggtgatgtggctgcggtgggtgcccctaagactcgggactgctgtgcctttcacacttgaatgaagagaaacacctgagctatatatttttttaaagcaactaacttattgctttatgtttatctatgaaaaccatagataaaatctgatgcatttttgtaatctgacaaagtaatttacatactgtttgtgtatcaatacaattttgtgttcttggtattcttagtctagctcacctcaatagccttgaatcctgcatatgaattagacattcatcactggcatatttagaatatctctaaaaggacttgtttgtagaataaggaattttctatgtttcaaagtgttctaaaacctggctaaaagaatgtatttttgtggatggtgttgacttctgactctaaaagcaatcaaacatgtttctgctggacagtgaccaagaattatagtaccttcttatatttttttatagaactgtatatttattttgaaagaaatgttattcgtgctttaaaaaggaaaaaaaaccatgaatcaaataagtattgacttccgtttcactggtattttgactgataaaaaagggaagagggagcgggcataccaagtgtccttctaagcctccatcagcctcaccatggaaagagaggaatctgggtgtagggtgttctgttgggggttgttagagaaaaggaggcaggagaaggggctctgtttgttgtgctctagcaatttcatggaggaaaaacacgctaatattcttaatgcttttcagctgatttctgtataacaggcaaatgataggattactctgtaaagtttcatagaaagattaacgctgagcagtcaa

SEQ ID NO: 687 - DNA, 3492 bp, Homo sapiens
gagccggtccggtgtgtgcaggggagcgcctcgccagcggtccgcagggctggagacccacgccgtggagaggaccagcctcaggtcgccccgcctgggcccgcgccccgacctcgctgcccccgcctcgcctctctgcccgtggcgcttacggccaccttggcctcgggggcagggcatgggcggcccccgccagatcgcccagcgccagtactaactgccctcgctctggccttcgagcccgaagcctcttctgcgcgcacaacctaggcagtaatcctaaactagcgggcaccacagaccagctgcagccaccccaacccagggatcacttccggacccctcgaccgcccggcaccagcgcgcaagggacccttcagccggagaccagagtccagtcccggtcacgaggccaccgccgctgcccgcctcgagaagcaccacgcgggctgagccgtcggctagcgggtcactcccgagcctctgtctgcaccgcgccagccccagaccacggacgctgagcctccagcgcgtgccagcctgggccgctgggctctcggggccagcccgcgacgatcccctgagctctccgcagaagggccgagcgtccgttccggggacgccaggcccgcccccgccccccgacagccgcggggatccagagcccgggggtgcgggacgcccgcgccatgactgccgagagcgggccgccgccgccgcagccggaggtgctggctaccgtgaaggaagagcgcggcgagacggcagcaggggccggggtcccaggggaggccacgggccgcggggcgggcgggcggcgccgcaagcgccccctgcagcgcgggaagccgccctacagctacatcgcgctcatcgccatggccatcgcgcacgcgcccgagcgccgcctcacgctgggcggcatctacaagttcatcaccgagcgcttccccttctaccgcgacaaccccaaaaagtggcagaacagcatccgccacaacctcacactcaacgactgcttcctcaagatcccgcgcgaggccggccgcccgggtaagggcaactactgggcgcttgaccccaacgcggaggacatgttcgagagcggcagcttcctgcgccgccgcaagcgcttcaagcgctcggacctctccacctacccggcttacatgcacgacgcggcggctgccgcagccgccgccgccgccgccgccgccgccgccgccatcttcccaggcgcggtgcccgccgcgcgccccccctacccgggcgccgtctatgcaggctacgcgccgccgtcgctggccgcgccgcctccagtctactaccccgcggcgtcgcccggcccttgccgcgtcttcggcctggttcctgagcggccgctcagcccagagctggggcccgcaccgtcggggcccggcggctcttgcgcctttgcctccgccggcgcccccgctaccaccaccggctaccagcccgcaggctgcaccggggcccggccggccaacccctccgcctatgcggctgcctacgcgggccccgacggcgcgtacccgcagggcgccggcagtgcgatctttgccgctgctggccgcctggcgggacccgcttcgcccccagcgggcggcagcagtggcggcgtggagaccacggtggacttctacgggcgcacgtcgcccggccagttcggagcgctgggagcctgctacaaccctggcgggcagctcggaggggccagtgcaggcgcctaccatgctcgccatgctgccgcttatcccggtgggatagatcggttcgtgtccgccatgtgagccagcgtagggacgaaaactcatagacacatcggctgttcacacgttccccgcaatctgagaacgaacaggaatggagagaggactcaactgggacccacgtggaaaagaccgagcaggccacagaggctcggtctccccgcgcacagcgtaggcacccggtgtactctgtaaacgggaggaggtggggcgaggcagccagagcccttggactggcacagggaccctcgatggagcgaagccctcaaacgggatgctttctggtattctatcggggagggtccttggcggtaaccagagggcagcgtagtgtcaacaccagagaccaggatccaaattgtggggaatcagtttcagccttccatgtgctgccggaactcgggcctttttacgcggttcgtcctctagtgcctttaactgcgttactacaataaaaggctgcggcagcgcctttcttcttaaagtgaggaggacaaatttgcaaaagaaataggcttttcttcttttttaaattggagaaatctctgctctggttgacctgggctggttttccctgtctctgagaacttgagacctagctccgagttgaactgtgcgtcagcactccagtcccatcacctgaaccttcagtctcccccatctgttacactagagggctgcaggactctatccaccgcccccgggttatcattcagggccccatcatcttggatgctgccctgcgtatttggcagcaatggtgggccacccagggcctctgagtagccacccaaagcctagccgctgttctagggaacggaaaagagttcatggccaagcgtctaacctaaagtcccaggattggctccaggcagcaattatatcataacttattgaacttttgagcaggacgtgctggtaatttcatggctgttactgcccagtcataaatctgcttttccattataaggcagagagaagtacattcgttcatttgtccactgtttcttgtcatcacgcagccctggacccaaagggtgaactaaagtttaaggagatgagaggattcaaggagcccgttggtgacgcctttcagtagctggggagggctcttccatccccagcaccccctgctacacctcagcagcctcccccatgcaaaaaggaaagagaaaaattaagttagggcagtcagtaaagtgagctttagaaagaaactggaattttaacttcattttgtatcttgcttaagtagcaggctcactaaaattagagaaagtccaataactctccccctttcccttgagaaatctttaagtttcgattctggagcaaaaactttcagcattaaatatttcagaggctccattcacagctttcagataaactggagtgttcagatggactgttttaataaaaatctttgagcaagtgagttatggcaagagaaactcagcctctttctgtataaacttaacagggaagggctggggtgtgaaaaagaagattgtatgaaaaccattggtaatttttattttttatttttgggactgcactatcctgttcacgaagacatgtgaacttggttcagtccaaatggggatttgtataaaccagtgctctccattagaaatatggtgcaagccacatatgtaattttaaatattctagtagccacattaataaagtaaaaagaaacagg

SEQ ID NO: 688 - DNA, 774 bp, Homo sapiens
ctttcttgggctctaaggacccaggagtctgggtgcacagcctccttctctctgagattcaagagtctgatcagcagcctcttcctcctccaggacccagaagccctgagcttatccccatggagctctgccggtccctggccctgctggggggctccctgggcctgatgttctgcctgattgctttgagcaccgatttctggtttgaggctgtgggtcccacccactcagctcactcgggcctctggccaacagggcatggggacatcatatcaggctacatccacgtgacgcagaccttcagcattatggctgttctgtgggccctggtgtccgtgagcttcctggtcctgtcctgcttcccctcactgttccccccaggccacggcccgcttgtctcaaccaccgcagcctttgctgcagccatctccatggtggtggccatggcggtgtacaccagcgagcggtgggaccagcctccacacccccagatccagaccttcttctcctggtccttctacctgggctgggtctcagctatcctcttgctctgtacaggtgccctgagcctgggtgctcactgtggcggtccccgtcctggctatgaaaccttgtgagcagaaggcaagagcggcaagatgagttttgagcgttgtattccaaaggcctcatctggagcctcgggaaagtctggtcccacatctgcccgcccttccagcccttccccagcccctcctcttgtttcttcattcattcaacaaaatttggctggaa

SEQ ID NO: 689 - DNA, 4330 bp, Homo sapiens
agaggccgaggaagccggttccggggacgggcaacagggactcagggaccagaaggcggctgcaggacgcgaccgagcaggaccccaggcccgggaacgacgtcgcgagcgctgagactgccgggcctcccagcccatctggcattcgagcgcaggaccgggcgccccggcaccgccgcgcgccacccgctaggatgccggtggccccagcgccctcagccgacggaggagccctttttcaacgccctcgctggagtctggcctgcacgccttgctgaatgaagccggaacctcagccccgcttccctttgaaatgaatgttcctggggcgccctctcgtggattttggagctaatcgtctgtgaatgccaagtgatggcaactgccctcccgccgcgtctccagccggtgcgggggaacgagaccctgcgggagcattaccagtacgtggggaagttggcgggcaggctgaaggaggcctccgagggcagcacgctcaccaccgtgctcttcttggtcatctgcagcttcatcgtcttggagaacctgatggttttgattgccatctggaaaaacaataaatttcacaaccgcatgtactttttcattggcaacctggctctctgcgacctgctggccggcatcgcttacaaggtcaacattctgatgtctggcaagaagacgttcagcctgtctcccacggtctggttcctcagggagggcagtatgttcgtggcccttggggcgtccacctgcagcttactggccatcgccatcgagcggcacttgacaatgatcaaaatgaggccttacgacgccaacaagaggcaccgcgtcttcctcctgatcgggatgtgctggctcattgccttcacgctgggcgccctgcccattctgggctggaactgcctgcacaatctccctgactgctctaccatcctgcccctctactccaagaagtacattgccttctgcatcagcatcttcacggccatcctggtgaccatcgtgatcctctacgcacgcatctacttcctggtgaagtccagcagccgtaaggtggccaaccacaacaactcggagcggtccatggcactgctgcggaccgtggtgattgtggtgagcgtgttcatcgcctgctggtccccactcttcatcctcttcctcattgatgtggcctgcagggtgcaggcgtgccccatcctcttcaaggctcagtggttcatcgtgttggctgtgctcaactccgccatgaacccggtcatctacacgctggccagcaaggagatgcggcgggccttcttccgtctggtctgcaactgcctggtcaggggacggggggcccgcgcctcacccatccagcctgcgctcgacccaagcagaagtaaatcaagcagcagcaacaatagcagccactctccgaaggtcaaggaagacctgccccacacagccccctcatcctgcatcatggacaagaacgcagcacttcagaatgggatcttctgcaactgatcgtctccatgcgccctgctctgcggctgtgttcttatttattgcatgcgtcgcttccacaggggcccctcaagagctgtgactcgggagagctaccttactttgaccaacagcctgcccagtgtggatgtctcttacagagggggcccaaggaatcaccaccccgcttcagtgtaaacaacgtgccttgtccactttgggctccagagtctttcagatgtactaagctgctgacatcatccactgccttctgctgcatcctagacaccctccctgttgttcacagagagggaaggtcgtgggccacacaatgctgtgtgaccctctccgtgtgcctctgaatggtgttttgatgattttacactacatttcctgtgcgtagaatggatgcttgtatattcgtacatctctatgttacacagaatttgtgttgcaggtgtttgccatgtggtacctacatagaatctccatacaacacacaggtaacaggttatacaagtggattcagactgaacccccagtacaaggacattgttttgaactaggtggacatgccatccctggtctccttagactgacatgattctcatgttaaccaagttttaaaagttcaaattccccaaaaaggcttgtccaaggctggccccagatgtgtgggtctgacccacaccagccctgtgtcctgtcctttcagtcatttgtccctgcgtaattttaatcgtattccaaagcccaattatgtgatggttttcaggtttctgcaaattacagaagagccagccaagatcacccaggagcttgtgcccccagatgggccaaagaaagagcctatgaaggagaagcagaagcagacggctggcctggctcaccttcccacgccagtggggcaggggtctgcttcaggaaatggaagctgtccaggaaatgagcagagattcacaagacagcactttgattctatgttgagtttgtttctatattagaaaagcagcaagtcagtaatcccccgtggcatcacagctaagtagctgtggccaccggcagtttcacagcatcctgaaagctggcactgatcgtgactatcagtgaaagaagtttaattttcaggttagaaaatgtgatctggcagtttatgcattcttcagagtaatgtaataatacctatgtgatgctgtaattttacttttcaacataagttgaacccgtagcagtctgtttaccttgtaaagggattacttagaagacatttttgtacatgctcttccccaaggattgtacgtattatacaaatagatggaaagaaaagtgaacacgtttgtagaactttcataagcacacagttgctgtgttgagttctctttaaaaacaaggacaaaaccaaccagcgttcaaaggaacctcccatcagagtcccctaaagtattttaggttcagtgagcatttgcctgaataaaacctaaaagagtagtcttaacacattactaactttttctaagagaaattgattcctgttttgtcatctgatgcaatttgctcttataaagagacattttcataggttcagagtaactcacctccatgggctgaccaaaggcttttctaatttttgttactgatgagatgaaacctatttgtaaggagatcttccccaggagcatttctgttgccttcttgacatcaatgaaaagtagcatattctcttatgaaatagcatgagaaaacacagggcatttctaggacagtaaaacgttaaagtactggattaagaaaacaacaacaggctgggcgcagtggctcacacctgtaatcccagcactttgggaggctgaggcgggtggatcacctgaggtcaggagtttgtgaccagcctggccaacatagtgaaatcctgtttctactaaaaatacaaaaattagctggatgcgatagcacgtgcctgtagtcccagctactcgggaggctgaggctggagagttgctcaaacccgggaggcggagattgcagtgagccaagatcgcaccgctgcactccagcctgggtgacagagcgaccctctgtctcaaaaaataataataataataaataaaacaacaacaaaatgcatcagagagccaaaacattcagtattgcattttcacataggtgatgaaatgactttggaactttatctgtgttatagttatgagttgctttgggagacttggagctctctgtagctattgttcataacactttgctccataaccctgatgtccgcagtatctaagtatctcagccttcatccattaactctactagggagcccacagccaccatttccactaggaggtatcaatatttgtggtatgacataaggctcccttgaaataacaagacttttgagcaatctgaattaaaaatacatcaaaaaagtaatagcgctcatttgctaaatgcaaaaaataatcacctttgataccaatgtgcaccaatatgcctaactagctagccagctggagataatttaccagggaatgtttcaaagccctaaccttgaagtttggaaacaggtggtcttctatgctgcagagaaactatgcattaggtctcttttcaattagaaacctttactatttccaatgtatgtttgttaaaaataataataataaaaccaaaagcctttgtggaaacccactcttcgtagtccatgtgatgggattgttttatcgttttcaccgggtgccctccccactgcaggggtgcgcactgttgttgcaggcttgctacccacctgtgtttcttagcatttcaggaattaaaccacattcagaaccccaaa

SEQ ID NO: 690 - DNA, 8801 bp, Homo sapiens
agccgcccgccccggccgcccgcccgccccgcccgcgcgcccgccgcccccggccccccgggtcccccctcggccgggcagcccccaatcccgcgccgcccggaccccctcctcctccctccctcctccctccgccccctccccgcgggactccggcgtccccgccccccagtcctccctcccctcccctccagcatggtgctcgcggccccgctgctgctgggcttcctgctcctcgccctggagctgcggccccggggggaggcggccgagggccccgcggcggcggcggcggcggcggcggcggcggcagcggcgggggtcgggggggagcgctccagccggccagccccgtccgtggcgcccgagccggacggctgccccgtgtgcgtttggcggcagcacagccgcgagctgcgcctagagagcatcaagtcgcagatcttgagcaaactgcggctcaaggaggcgcccaacatcagccgcgaggtggtgaagcagctgctgcccaaggcgccgccgctgcagcagatcctggacctacacgacttccagggcgacgcgctgcagcccgaggacttcctggaggaggacgagtaccacgccaccaccgagaccgtcattagcatggcccaggagacggacccagcagtacagacagatggcagccctctctgctgccattttcacttcagccccaaggtgatgttcacaaaggtactgaaggcccagctgtgggtgtacctacggcctgtaccccgcccagccacagtctacctgcagatcttgcgactaaaacccctaactggggaagggaccgcagggggagggggcggaggccggcgtcacatccgtatccgctcactgaagattgagctgcactcacgctcaggccattggcagagcatcgacttcaagcaagtgctacacagctggttccgccagccacagagcaactggggcatcgagatcaacgcctttgatcccagtggcacagacctggctgtcacctccctggggccgggagccgaggggctgcatccattcatggagcttcgagtcctagagaacacaaaacgttcccggcggaacctgggtctggactgcgacgagcactcaagcgagtcccgctgctgccgatatcccctcacagtggactttgaggctttcggctgggactggatcatcgcacctaagcgctacaaggccaactactgctccggccagtgcgagtacatgttcatgcaaaaatatccgcatacccatttggtgcagcaggccaatccaagaggctctgctgggccctgttgtacccccaccaagatgtccccaatcaacatgctctacttcaatgacaagcagcagattatctacggcaagatccctggcatggtggtggatcgctgtggctgctcttaaggtgggggatagaggatgcctcccccacagaccctaccccaagacccctagccctgcccccatccccccaagccctagagctccctccactcttcccgcgaacatcacaccgttccccgaccaagccgtgtgcaatacaacagagggaggcaggtgggaattgagggtgaggggtttgggggaaaggggaagcaggggcatagtcagggtggggagtgtttgaagtttgcagatgagaaggtttgacaaaaagacagagagatgtagagacagtgatagagacagaggaacaaaaagagcagcagtgagaaggcaaagagagaggcagaagagacagacgaggcagagacaaaacactgagaaagagactgaaatggagtaataaatgaaagccccacaccaagcctcctttcttccactggcaaggtgaggggcttggtatagtttggggagatcccctgactattcagtaggagaagaaatcaaaaatccattcttttctccttctctccctccaacagtggccaggggaaggggaagtgagggcaggggcaaaaagatttgggaatttttatttatttatttattgtgacttttcatttttttggtatttggctttactggaataggagggcccctgcccactgtgccccgtttatcccttattccccaaaccctgctctccccaacacctactcacttaagcacttgtataaagcctccagggttgggaatgggagtaaagggcaagagggcggacacatgaagtttagtttctaacccatcatcaccctaactcaaccttttctgagccaaatggcttgaattgaagccagttgtcatggaaatagtaagaggttagggtttaagagctggggatgcgggggtgggagagagaaccctcaacatccaggatctatataatgagagctactttaaaccctcaggtccaccctcatgatgctgagttatttagccagagggtgcagcctgcttatgcccaaattccctcagccaagagagagaccaaagagcctctggaatggccctgctcccagcctctatcttcaggtcaattagagagagtatagagaccccagagtcccctgggtctggaaagcgttaggagaggtcaagaaaggagcagtaaggaggctgaaggttacagggcatttgaatccaaatcactgctctgggctagggaatagagccagcagaccaaggtgggaaggattctggaagggggacattttagtctcctaaccccaaagctcagggtggaagaggggagaacaaggaagcagagtgtataattattttttccttttatttttggaatctaacagtacctggcagcagggaggggaaagtacagtggggaaaagcatctgacaaggccagttagaacagaggatgggaaggatggagactcccgggcttggaaggctaggaagcaggcagagactggttgccatttcaagtcactagctaggcccattcattcctcccacaaccctgacccattctcctctggactcactgtgcctcagtttcttcccctcaatggaatgagaaatgacagcacccgccacagccaagagatgaattctgagcacttaccacgggcactttatggacataaaatacctctcgctgtgggacagataaccagggcaccagagtagtggtgaagagatgtgaggcttaagaggagtcacaggcttcagagtacaagttcccctctgcctcccagctggacagtgcctagaagccaaggagttgagaatctcctgatccacaccctatccttacttcaccaccaggcctcttggctccaggcaagagcttagaggatgtcaggagaggtgggggtaagaatcttcagcaaaactgtcactctaagtagagccagcagttacgggtctgataaaaacagtactgaactaaagtaaagcccaagctggtgagcaaaactggatggctcattcttcccaagagcatgactctcccccttggccagttggtggaaggggcaaaggtatgtgaccacccttgagaaggtgatgttggtgagctttaacatcttattcctattcttatagtgagaaagtgaaacaagatctttcagtagaggaatgggcagggctgttaggctcttcagcttgccttcacccatatagcagctatgctaaccccaagcctctctggccctgttcttcatccttccttctgccccaatcctgaaggacaagacacacccggccatcaacaccactcacatttccttggtggaaggaaaggaacagagaagtgaagaacagatacctccctccaaggtcaaatgcctcgtgatcttggcagagtagggattgggcaataagcatcaggtatcttccctctacagattctagagagctggggcattaaatatgggggacacttagaatacagctccttaaataccaccaaataaagacctttgtgtgtgtgtggtgggtggggggggggcaggggtctttctcttatgaacataaatctgtgagctgaagtctcattcccctgttcctccctacccccaaagaggcacagagtgaagggacttggggggcacagctcagcaacccagtgggagttagcaccccctcccaccttatgatgtgtgtggacctggccagtgcccctctgaacatatcattattagtgtaattatcatttattttgtgtatttgtcacattgtgtgcatgacagcctttgttaagggtgtctgaggagtatggagctgacaggggcattggaatgccaggaaagaacttcttcaactgagatcaaggcttcctggagggaaccactgcaaaaaggccatcaggcagttttcaagttatgtgacagagggcaaagacggccatagggtgctctgagttttgggatggtcacatgacacaatccagcacttgaacctgaaaaaaaaaataaaagcggtcaaagagtttagaattcagtgctgagctcttctccctaatcaagtgccacatttacaccttggagaaccggaggtgaagaggatctgagacaggaaacctcgtgttcaatgactaagaagatggggtcctggagcaagacagaaaacactaagggcatggtggtataaggtttgggacatgcaggccaaggaaggatggaaagaggacaggaaactgggggtacctagaacaacccctctctgaaaagcttgagccaaaacagtcccaaagacaacaagacccctctcccagcctccacagaatggaagatctaaaggttctcttgagatgatccagctagtatggaagatctaaaggttctcttgagatgatccagctagtgtcctattctcctgcagtccctgttcctaggtttcctcaacgaagtttgacaaaaatctaaaccaacatagccaacgaacttgccttgttacacaagagtggctaaaatagcatctcaaatattctttcagttcactgtaaaaatttttcccatgtacctagagcacaattccccaggaatatgagttgggaatggcaaaagaatattgcctgactcacatttttcaaaaataaggaaagctggctgggcgcagtggcttacatctgtaatcccagcactttggggggccgaggcgggcggatcatgcaaggtccggagttcgagaccatgctggccaacattgtgaaacctcatctctactaaaatacccaaaattagccgggcgtggtggcgtgcgcctgtaatcccagctacatggaaggctgaggcagaagaatcgcttgaacccaggtggcggaggttgcagtgagctgagatcgcaccactgcactctagcatggtgacagagtgagactcccatctccaaaaaaaaaaaaaaaaaaaaaaaaaggaaagcaggacccagtggtgtgctcctgtagttccagctattcaggaggctgtggcaggaggaccacttgaggccagagggtcaaggctgcagtgtgctataattgggcctgtaaatagccactgtactccaagctgagcaacacagtaagacactgtctctaaaaataattaaagtaaaataaaaataaggaaagctcctgtgacatcaacctgatccagaattggggacagcgctactgcgggttcaatgtactgccatgttttccctgtcttatcagttctatcagcacactgaccccactcgagaccaactacaagactaaggctggaagtggttgagtagcagaagtgttatgtattctatcttcccaagggaaccatatccacatctacccctaactttggcctgagctgaaaatgggttttctctccctgtggctcatttgtttcctatattgagagaacacccaaaaaaagactactcaagatgactttttacaagtcttttctttatcctaaaacatcctccaaccgaaggcatgggaagctatcctatactctgaccttgcctatattttaaatggcaggggccccaagctaagaatcagcaggcagtggcatctacagcttctggtctgtagtggcgtagaagcaggaaaatcaatgctccaaagcaacaatgtccagctttcctgccagtgagctgggcttgagggagtgaatgggactctttctgccttttctttttctcaaaatacgactgcattaactgggtgtatgcacacacaaacatgttcaaactagggcactcatacctagctagaacctactcagggaaagaaatatgtatttccacagtaccctgatcacccagtaaaagctaatatttattgaataattactatgcaaattatggtaagcaaattgtagtgtgaatacatgatatgagaatatcacttaattcacacagcaaccttcacaatggggttccttttggtacagtctgaaaagagaatgattatctgcgcagggtctcagagctagtgtggtagaataagaaattaaacctaagtagttgctaaacaatattacattctaatctatcctattgaaagtgatccgggaggtagaaacctaaatacaggaataacataagggaaagagataacaagaaagttagggacaccttggactcaaagaatctggaaagatgtgaaacctgtaattttaaatccctttggaagggaaaaacaagaaaagtctagatatggcaagagaaggggaggttaaattttggggggattccaataatcagaaataagtggcattgccagaggccctcatataagagaacagcaaaaaagttatcctcccttaagttcctccctcactcctcatatcagacacagcaagagaactcagctcaacaccaagaagtcctgcccttattcacaccttccttcctatagccctcatcctcacagaagcttctagcctctatcttcagcagttcttaagaggtggggtggggggctgggcagtttagagtgagagtggaaaaaaagaataatcctagagaaccataaaaaagtacagatttacagctgaggaagctagttctccccacagcttttatagactccctcattaagagcttccaggtatgcagagaatgtcacagcttcaggaattggaatcagttaaccacatctggatgctggatcaactatagtagggaaacggggagaggaaggaagggtactaagatctcaggtaaacaattacaagcctcaatgtctgttccatctccaaacggaattactattttaaaactgaattgggaaaaaggcatcctgaactattcatgctcaaagagtatgtggagaatgactataatgagataggaaggggaggacttcatctggcttggaggttagagacttctgaccaacataggaacagctgctgaaatgggatgaaagaggttaataagaaaaaaaaaaaaatcctcacaaattggaaaacactgttcaaagatctaggggaagtaagatgagtgaggagaataattaggcttcaagaagagaatcctggcaagtaaggctgaatatctttctggaaggttatagaggataaagagacgaagaaaacttccaaaagatccactgttccacttcataatcagcatctgctctattccctcatgtatttttctctttttaaaaccatattcaggaagaaaccattagtgaatctataatctctcaagttacaaatcagatctattctgttttcagatgaaggcagagtagagagaggaaaagctagccccaagatcagagcctgaggtaaagaaaaggaaggcagacagaaaagagggaaaagggaaggtcattccaattttaaggtttatttggttgaagaggtgtcaaaaatttaaccagcattcccttttgttcacttctccaaagtctcagaatggggcaaacttcacaacaaatgggcagcagtttttggatctgctctccaaggcacaatttttctaaattatctaaactttaggtccctgctttcctcaccaaccagagactttggagaaataaagagatatcttgacattagaaaggtgatcaaactattaccatttcattaagcacaaaaccaggcaggttttagtagaaataaggataaaggattacaccacagcaacatgggacctgatcatagtaccaaagtcttcaggtaaggtgtcaggctcctaagtcttattaccaaaaatagctcaaacaaaaaccgagcttatataaagattaagaggagaaattctgcaataacatatccaaaaagattaagcaggtttcagatctacatgaacttgaagcctccagttccactgcttatgttcccaatgatttagctaacaatgcgtaacagctctgacatcctctgtcatgctttgattctgcatacaaaatttcttctgtctctgagggatatccagcccatctcccttcctgaactgactgaccaacatagtatcgtatcacatcacccttgaaatcagggcccttttcctttaatgtgggaccctggactccattttatccaagaaaaagtctgcattattagctaataacagaaggctactaatcactgcccttgtatttatatcctttgcaacacctaaaacctcccatgttctgttttatttcagtgggtcactacaagctgctggagcaaagacttggtgggtgggtaacttaacctcttcacagaggataaaaaatgcttgtgagtatgacagaagggaataaacaggcttaaagggtaaactcagtccttttccttgtcttctcttctaagggataaaggtattatggccaattctctataatatttgcccctgaagctccccttatctggtctaatctagctccaataaatcaaaggagcacctaataaaaca

SEQ ID NO: 691 - DNA, 2308 bp, Homo sapiens
ggagtttggggatgaggcagctgaagaacagagtcttgtgatggtggaaccaggacttcgttgttccttcattgtgtgggcagaagaggtggaggattttaggcgccacctggtcttgtccccactgcccagacaggcagggaatccctcttcttccttttgctgaatcagctggagaagaaagcccagcaggaggcctgctagcctcagcctcgggccctaccagggtcctaggtactggaatggaacttcgccgaggtcaccgctcaaacggccacaacgagggagccgatttagatcctctgggcctgttccttccttttctttaaacgtcccagtctagcttagaggaggacctgttttgttagataaatggcaagcaaaaaacgagaagtccagttacagacagtcatcaataatcaaagcctgtgggatgagatgttgcagaacaaaggcttaacagtgattgatgtttaccaagcctggtgtggaccttgcagagcaatgcaacctttattcagaaaattgaaaaatgaactgaacgaagacgaaattctgcattttgctgtcgcagaagctgacaacattgtgactttgcagccatttagagataaatgtgaacctgtttttctctttagtgttaatggcaaaattatcgaaaagattcagggtgcaaatgcaccgcttgttaataaaaaagttattaatttgatcgatgaggagagaaaaattgcagcaggtgaaatggctcgacctcagtatcctgaaattccattagtagactcagattcagaagttagtgaagaatcaccatgtgaaagtgttcaggaattatacagtattgctattatcaaaccggatgctgtgattagtaaaaaagttctagaaattaaaagaaaaattaccaaagctggatttattatagaagcagagcataagacagtgctcactgaagaacaagttgtcaacttctatagtcgaatagcagaccagtgtgacttcgaagagtttgtctcttttatgacaagtggcttaagctatattctagttgtatctcaaggaagtaaacacaatcctccctctgaagaaaccgaaccacagactgacaccgaacctaacgaacgatctgaggatcaacctgaggtcgaagcccaggttacacctggaatgatgaagaacaaacaagacagtttacaagaatatctggaaagacaacatttagctcagctctgtgacattgaagaggatgcagctaatgttgctaagttcatggatgctttcttccccgattttaaaaaaatgaaaagcatgaaattagaaaagacattggcattacttcgaccaaatctctttcatgaaaggaaagatgatgttttgcgtattattaaagatgaagacttcaaaatactggagcaaagacaagtagtattatcggaaaaagaagcacaagcactgtgcaaggaatatgaaaatgaagactattttaataaacttatagaaaacatgaccagtggtccatctctagcccttgttttattgagagacaatggcttgcaatactggaaacaattactgggaccaagaactgttgaagaagccattgaatattttccagagagtttatgtgcacagtttgcgatggacagtttgccggtcaaccagttgtatggcagcgattcattagaaaccgctgaaagggaaatacagcatttctttcctcttcaaagcactttaggcttgattaaacctcatgcaacaagtgaacaaagagagcagatcctgaagatagttaaggaggctggatttgatctgacacaggtgaagaaaatgttcctaactcctgagcaaatagagaaaatttatccaaaagtaacaggaaaagacttttataaagatttattggaaatgttatctgtgggtccatctatggtcatgattctgaccaagtggaatgctgttgcagaatggagacgattgatgggcccaacagacccagaagaagcaaaattactttcccctgactccatccgagcccagtttggaataagtaaattgaaaaacattgtccatggagcatctaacgcctatgaagcaaaagaggttgttaatagactctttgaggatcctgaggaaaactaaagtatatactgtgaaaactttgagaagataatacatatgttcacgtcaatatacaaccatttggcacagcttcctgggaggaataataagaaaaacatgctttggaggaaaactcaagatacaaaaatgaatggctatgcataataacaataaaaatgtattccccaaa

SEQ ID NO: 692 - DNA, 752 bp, Homo sapiens
agcgccgccgccgctcctcgcctccttgctgcacgatggcctcgctccgggtggagcgcgccggcggcccgcgtctccctaggacccgagtcgggcggccggcagcgctccgcctcctcctcctgctgggcgctgtcctgaatccccacgaggccctggctcagcctcttcccaccacaggcacaccagggtcagaaggggggacggtgaagaactatgagacagctgtccaattttgctggaatcattataaggatcaaatggatcctatcgaaaaggattggtgcgactgggccatgattagcaggccttatagcaccctgcgagattgcctggagcactttgcagagttgtttgacctgggcttccccaatcccttggcagagaggatcatctttgagactcaccagatccactttgccaactgctccctggtgcagcccaccttctctgaccccccagaggatgtactcctggccatgatcatagcccccatctgcctcatccccttcctcatcactcttgtagtatggaggagtaaagacagtgaggcccaggcctagggggccacgagcttctcaacaaccatgttactccacttccccacccccaccaggcctccctcctcccctcctactcccttttctcactctcatccccaccacagatccctggattgctgggaatggaagccaggtggggtcatggcacaagttctgtaatcttcaaaataaaactttttttttgtacaa

SEQ ID NO: 693 - DNA, 401 bp, Homo sapiens
accacgcctcctccaagtcccagcgaacccgcgtgcaacctgtcccgactctagccgcctcttcagctcgccatggatcccaactgctcctgcgccgccggtgactcctgcacctgcgccggctcctgcaaatgcaaagagtgcaaatgcacctcctgcaagaaaagctgctgctcctgctgccctgtgggctgtgccaagtgtgcccagggctgcatctgcaaaggggcgtcggacaagtgcagctgctgcgcctgatgctgggacagccccgctcccagatgtaaagaacgcgacttccacaaacctggattttttatgtacaaccctgaccgtgaccgtttgctatattcctttttctatgaaataatgtgaatgataataaaacagctttgacttga

SEQ ID NO: 694 - DNA, 3361 bp, Homo sapiens
gcagtcctcttccgggtgatggcggccgggtgccccggatgtagccctggcgcaagcatctcttcttttttccacctcgccttccgcggattcccagcttgagaaacacctctttgccccgtcatgccaaagaggaaagtgaccttccaaggcgtgggagatgaggaggatgaggatgaaatcattgtccccaagaagaagctggtggaccctgtggctgggtcagggggtcctgggagccgctttaaaggcaaacactctttggatagcgatgaggaggaggatgatgatgatggggggtccagcaaatatgacatcttggcctcagaggatgtagaaggtcaggaggcagccacactccccagcgaggggggtgttcggatcacaccctttaacctgcaggaggagatggaggaaggccactttgatgccgatggcaactacttcctgaaccgggatgctcagatccgagacagctggctggacaacattgactgggtgaagatccgggagcggccacctggccagcgccaggcctcagactcggaggaggaggacagcttgggccagacctcaatgagtgcccaagccctcttggagggacttttggagctcctattgcctagagagacagtggctggggcactgaggcgtctgggggcccgaggaggaggcaaagggagaaaggggcctgggcaacccagttcccctcagcgcctggaccggctctccgggttggccgaccagatggtggcccggggcaaccttggtgtgtaccaggaaacaagggaacggttggctatgcgtctgaagggtttggggtgtcagaccctaggaccccacaatcccacacccccaccctccctggacatgttcgctgaggagttggcggaggaggaactggagaccccaacccctacccagagaggagaagcagagtcgcggggagatggtctggtggatgtgatgtgggaatataagtgggagaacacgggggatgccgagctgtatgggcccttcaccagcgcccagatgcagacctgggtgagtgaaggctacttcccggacggtgtttattgccggaagctggacccccctggtggtcagttctacaactccaaacgcattgactttgacctctacacctgagcctgctgggggcccagtttggtgggcccttctttcctggactttgtggaggaggcaccaagtgtctcaggcagcgaggaaattggaggccatttttcagtcaatttccctttcccaataaaagcctttagttgtgtactggggccttggctgtgctgatggccagaagccaggggccttctccacagtccctttggacttgtcttggtccctgagtactcccatgaagatccttcttggaggtgcctgtcaggtatcctgtggcctccctgcctggactctgcttgccgtgtaaacacccccaactgcgctgctctgtgctcctctcccaggtttcttgttcgattcctcttaggtctttggctttcaggacctcagattctttatccttgtagccaccagaggacagagccccagaagtggatgttttaggcccagaaggaccagggcatcgagaagacattgggaccctgttgggggtgagcatggaaccctcttactctcgcttcaccctctcaagctccttagatgctgggcagaagtgggatgagtggcccaagaccgagatccctaaggttctgagagccagtgtcttccctaatctggctttcctctatccttgccgtcgttcccacagcccttcagtgaagtgcaaactcagtggccaagtgtgggccaagtgtgcattgtactggcacagagaggggcagtgactcactggagatcacaggaatcaaagggctggcccagacccagtgggctcctttcccagacctttcttggcacaaagcctttgctgcctggccttggaggccctgcggcctacattctctggaccccactatgtgcctggcacagggctagtgccttgaggaaactgaggtagctgggttggtccccttccaggaattcagagtctggtggcaggggcatgggaaatagacagatgtaattctatagcctgggcctggcaccctccacctccacgccccaccagcattgccttacgcctcccttgccccacgttagatggtttcttccggttttgcactctggctgccccttggagtctcctggggagctgtaatatctctttggagattcagattgagctggtctaggttgtggcccaggcattgggcattttggaagcccccaggtgttttcagcttgcagccaggccgagagagagcccctgagtcagatccccatggtttaggcacacctagcgggaggggtggctcctggaccccaccgtggttggagagctgagcatgtgtgtggctttagtggggtctgttagttatgggggtctgggcactggagctgcaggacacttgggatcccaggtcagaaagggccagatgagcaactaggaaagacttgggggccagggcggagtggggtcacctgacactcttgtgaggccccttctagtgcctgctcacaccggaatttcattcactccaagaagccatcaggggtaagataccttcctttaaacgtcactaagaaagaagaggcctgccggtgacacagtaagatgccattgatctaaagatgcgtcttgatttcagaaaggtccggaagtggaaagcaggtttcagggctgctgaggtacagggttctcctgtaggccccagggatggtctcaggggtgctgagtgcgtgcgtggtaaatggatggagcccaggggcgcctcctgccagtgtcctccaggcactcaaacctagcccttctgaagccgacctcacgtgacctcacagcccctcctgaaggcgcctcactgatgacggtgggtggaataacagcccccagagatgtccaggtttggaaccccaggacgtgggaaagtgttaccttgcgtggcaaaagggacccggcgcctgtgcttcagttcaggatttcgtggtggggagatgaccgtggatggttgaggtgggccctgagtaatcatgggggcccttataagggaaggggagtcacgagggtctgcgcatgaagcaaggaagcttctggctgtgaagatggcaagaaggcctggggccaggcgatgaggtggcccctggaggagctggaaaaggcattggattctgccccagagcctccgtggagaaacaaagccgcactgacaagacttcagcctggtgaaaaccattttggactcctgacctctagaactgtaagataataaattggtgtggttttcaa

SEQ ID NO: 695 - DNA, 896 bp, Homo sapiens
agattttcaggttgattgatgtgggacagcagccacaatgaggaactcctatagatttctggcatcctctctctcagttgtcgtttctctcctgctaattcctgaagatgtctgtgaaaaaattattggaggaaatgaagtaactcctcattcaagaccctacatggtcctacttagtcttgacagaaaaaccatctgtgctggggctttgattgcaaaagactgggtgttgactgcagctcactgtaacttgaacaaaaggtcccaggtcattcttggggctcactcaataaccagggaagagccaacaaaacagataatgcttgttaagaaagagtttccctatccatgctatgacccagccacacgcgaaggtgaccttaaacttttacagctgatggaaaaagcaaaaattaacaaatatgtgactatccttcatctacctaaaaagggggacgatgtgaaaccaggaaccatgtgccaagttgcagggtggggcaggactcacaatagtgcatcttggtccgatactctgagagaagtcaatatcaccatcatagacagaaaagtctgcaatgatcgaaatcactataattttaaccctgtgattggaatgaatatggtttgtgctggaagcctccgaggtggaagagactcgtgcaatggagattctggaagccctttgttgtgcgagggtgttttccgaggggtcacttcctttggccttgaaaataaatgcggagaccctcgtgggcctggtgtctatattcttctctcaaagaaacacctcaactggataattatgactatcaagggagcagtttaaataaccgtttcctttcatttactgtggcttcttaatcttttcacaaataaaatcaatttgcatgactgta

SEQ ID NO: 696 - DNA, 2761 bp, Homo sapiens
agcctggagtgaggcgcagcggcagcggcagcagcggcaacaagtgccggaggctagcagagccaagccggagcagtccctgccgccgacaccgccgggccgcccgtccggggcgccgcgcatggagcgtgagctgcggcggtcgccgggctgagccgcgcggagcggccgggacgtggatgtggccgcgatctcccgcccttgcccccgccccgccgagctggagctgctcccggacaagatatgagaaatgagtgttggacgtcgaagaataaagttgttgggtatcctgatgatggcaaatgtcttcatttattttattatggaagtctccaaaagcagtagccaagaaaaaaatggaaaaggggaagtaataatacccaaagagaagttctggaagatatctacccctcccgaggcatactggaaccgagagcaagagaagctgaaccggcagtacaaccccatcctgagcatgctgaccaaccagacgggggaggcgggcaggctctccaatataagccatctgaactactgcgaacctgacctgagggtcacgtcggtggttacgggttttaacaacttgccggacagatttaaagactttctgctgtatttgagatgccgcaattattcactgcttatagatcagccggataagtgtgcaaagaaacctttcttgttgctggcgattaagtccctcactccacattttgccagaaggcaagcaatccgggaatcctggggccaagaaagcaacgcagggaaccaaacggtggtgcgagtcttcctgctgggccagacacccccagaggacaaccaccccgacctttcagatatgctgaaatttgagagtgagaagcaccaagacattcttatgtggaactacagagacactttcttcaacttgtctctgaaggaagtgctgtttctcaggtgggtaagtacttcctgcccagacactgagtttgttttcaagggcgatgacgatgtttttgtgaacacccatcacatcctgaattacttgaatagtttatccaagaccaaagccaaagatctcttcataggtgatgtgatccacaatgctggacctcatcgggataagaagctgaagtactacatcccagaagttgtttactctggcctctacccaccctatgcagggggaggggggttcctctactccggccacctggccctgaggctgtaccatatcactgaccaggtccatctctaccccattgatgacgtttatactggaatgtgccttcagaaactcggcctcgttccagagaaacacaaaggcttcaggacatttgatatcgaggagaaaaacaaaaataacatctgctcctatgtagatctgatgttagtacatagtagaaaacctcaagagatgattgatatttggtctcagttgcagagtgctcatttaaaatgctaaaatagatacaaactcaattttgcatagaaaggtgtattttgaatagttcccatgttgtgttctcacattagagtaatttctatattaaaccatgaaaattgcctttatgagtgatacccatttgagggcctctaaacccttcaatttggtactcacgtgaagagggaaagcggaagatggtaatttttttttatggatgatatggcaggatgattggttctgatcttaccggctagtggtcatttttaaaaaacttgtaccctcttatctgaaatcctgtttctggaatttggccattttaagtgattttgtttgccctcttctataatattcctacttcccataataatgactgatttatttgtaattcaggtatttataaacctattggctacaaagactttgttaaacattatccagtggttttcgtgaaatggaattatgtttatttttatgggatttgggtaaattttaaattgtctagaaaactgaaatttcagttgtcagttgtggaattcagtttttcaattgtggaaatttcctgccaccccaacagtatttttgtgtgttaattaattttgcaaaatgagaatcatggtgtgacactcatctaatttatcttgttgtgatgttatggtcataataaggagaaagagggtttaatttttcttgtatttggtttcctggtggtatcatagtgtaattttagtatttgaaaatcagtgtgattccttaatggccaactgaagattgaattgccgctaacaaccatatcgtgttagtgaattttcaatatggaccaggaaggcatatgtattttgaacttgagtgaaaaggttgaagttacagacttttgcatagatggtttgtcaatttaaaattccagaatttattattgccatattttcacatgctgcttatacaagattattattgagtagtaactgcttccctgtctatgtagaagtgcctgtgtttttatttattgttcagatcaaagaccaaaacattttcttaaatatattttatgtaatattttatttgtatacagtgttgttgatgaaatatttaactagagcatgatattttaaatgttaaggtgtaacatatgttaaataaaactgttatttttgaattttaaaatttgttttttgggggtatgaactactagagtttaaaattctgccaaactattacttatatgtactattgtgtaacatactttcttgaaatatttttgtttatagaattgaaggttcttatcagatgggatactggggactataaacaatggaaataaagccactgtatttttaa

SEQ ID NO: 697 - DNA, 1605 bp, Homo sapiens
gaccattcagaagactgtccacccgtcctcagccccctctcttcgtgggctatctactcagttgatccctccctcgctggcttggctctgactcctgctcagacccatcacctttgccgggaatgatgtctggagaacccctgcacgtgaagacccccatccgtgacagcatggccctgtccaaaatggccggcaccagcgtctacctcaagatggacagtgcccagccctccggctccttcaagatccggggcattgggcacttctgcaagaggtgggccaagcaaggctgtgcacattttgtctgctcctcggcgggcaacgcaggcatggcggctgcatatgcggccaggcaactcggcgtccccgccaccatcgtggtgcccagcaccacacctgctctcaccattgagcgcctcaagaatgaaggtgccacagtcaaggtggtgggtgagttattggatgaagccttcgagctggccaaggccctagcgaagaacaacccgggttgggtctacattcccccctttgatgaccccctcatctgggaaggccacgcttccatcgtgaaagagctgaaggagacactgtgggaaaagccgggggccatcgcgctgtcagtgggcggcgggggcctgctgtgtggagtggtccaggggctgcaggaggtgggctggggggacgtgcctgtcatcgccatggagacttttggtgcccacagcttccacgctgccaccaccgcaggcaaacttgtctccctgcccaagatcaccagtgttgccaaggccctgggcgtgaagactgtgggggctcaggccctgaagctgtttcaggaacaccccattttctctgaagttatctcggaccaggaggctgtggccgccattgagaagttcgtggatgatgagaagatcctggtggagcccgcctgcggggcagccctggccgctgtctatagccacgtgatccagaagctccaactggaggggaatctccgaaccccgctgccatccctcgtggtcatcgtctgcgggggcagcaacatcagcctggcccagctgcgggcgctcaaggaacagctgggcatgacaaataggttgcccaagtgaggacggaccccttaccgatctgtgctctcctagcccaagagacccctggaggggctggagttttatccagcgcctcgtcgtatgtttggctgagcacctgtggcctgggtgcaggttaacttcttgttatcaggagcccactatgcagaggccaaaggtcggcagccagcgaggctatgaattggacctttttggtatctgtgtgactgctctgtgcccatccttagccaacttgctggcgtgacaagtgcccacaagtaacacaccaggtacccagagcagggtggacaggagagacctgaatcacagcagtgaggaattcctcaaagctgtgacctcgcccctgaacttgttcccagtgaaggtcaacagggccaccaaccagggttgaggaaccatctcagccatcctcccaggaagcccacccctgacccttactaatttttctaatgtgcaaactttttcattgaaaaataaaatatatttatgaaacaaa

SEQ ID NO: 698 - DNA, 6681 bp, Homo sapiens
gtgtccttctctgcgccggagtggctgcagctcacccctcagctccccttggggcccagctgggagccgagatagaagctcctgtcgccgctgggcttctcgcctcccgcagagggccacacagagaccgggatggccacctccatgggcctgctgctgctgctgctgctgctcctgacccagcccggggcggggacgggagctgacacggaggcggtggtctgcgtggggaccgcctgctacacggcccactcgggcaagctgagcgctgccgaggcccagaaccactgcaaccagaacgggggcaacctggccactgtgaagagcaaggaggaggcccagcacgtccagcgagtactggcccagctcctgaggcgggaggcagccctgacggcgaggatgagcaagttctggattgggctccagcgagagaagggcaagtgcctggaccctagtctgccgctgaagggcttcagctgggtgggcgggggggaggacacgccttactctaactggcacaaggagctccggaactcgtgcatctccaagcgctgtgtgtctctgctgctggacctgtcccagccgctccttcccagccgcctccccaagtggtctgagggcccctgtgggagcccaggctcccccggaagtaacattgagggcttcgtgtgcaagttcagcttcaaaggcatgtgccggcctctggccctggggggcccaggtcaggtgacctacaccacccccttccagaccaccagttcctccttggaggctgtgccctttgcctctgcggccaatgtagcctgtggggaaggtgacaaggacgagactcagagtcattatttcctgtgcaaggagaaggcccccgatgtgttcgactggggcagctcgggccccctctgtgtcagccccaagtatggctgcaacttcaacaatgggggctgccaccaggactgctttgaagggggggatggctccttcctctgcggctgccgaccaggattccggctgctggatgacctggtgacctgtgcctctcgaaacccttgcagctccagcccatgtcgtgggggggccacgtgcgtcctgggaccccatgggaaaaactacacgtgccgctgcccccaagggtaccagctggactcgagtcagctggactgtgtggacgtggatgaatgccaggactccccctgtgcccaggagtgtgtcaacacccctgggggcttccgctgcgaatgctgggttggctatgagccgggcggtcctggagagggggcctgtcaggatgtggatgagtgtgctctgggtcgctcgccttgcgcccagggctgcaccaacacagatggctcatttcactgctcctgtgaggagggctacgtcctggccggggaggacgggactcagtgccaggacgtggatgagtgtgtgggcccggggggccccctctgcgacagcttgtgcttcaacacacaagggtccttccactgtggctgcctgccaggctgggtgctggccccaaatggggtctcttgcaccatggggcctgtgtctctgggaccaccatctgggccccccgatgaggaggacaaaggagagaaagaagggagcaccgtgccccgtgctgcaacagccagtcccacaaggggccccgagggcacccccaaggctacacccaccacaagtagaccttcgctgtcatctgacgcccccatcacatctgccccactcaagatgctggcccccagtgggtccccaggcgtctggagggagcccagcatccatcacgccacagctgcctctggcccccaggagcctgcaggtggggactcctccgtggccacacaaaacaacgatggcactgacgggcaaaagctgcttttattctacatcctaggcaccgtggtggccatcctactcctgctggccctggctctggggctactggtctatcgcaagcggagagcgaagagggaggagaagaaggagaagaagccccagaatgcggcagacagttactcctgggttccagagcgagctgagagcagggccatggagaaccagtacagtccgacacctgggacagactgctgaaagtgaggtggccctagagacactagagtcaccagccaccatcctcagagctttgaactccccattccaaaggggcacccacatttttttgaaagactggactggaatcttagcaaacaattgtaagtctcctccttaaaggccccttggaacatgcaggtattttctacgggtgtttgatgttcctgaagtggaagctgtgtgttggcgtgccacggtggggatttcgtgactctataatgattgttactccccctcccttttcaaattccaatgtgaccaattccggatcagggtgtgaggaggccggggctaaggggctcccctgaatatcttctctgctcacttccaccatctaagaggaaaaggtgagttgctcatgctgattaggattgaaatgatttgtttctcttcctaggatgaaaactaaatcaattaattattcaattaggtaagaagatctggttttttggtcaaagggaacatgttcggactggaaacatttctttacatttgcattcctccatttcgccagcacaagtcttgctaaatgtgatactgttgacatcctccagaatggccagaagtgcaattaacctcttaggtggcaaggaggcaggaagtgcctctttagttcttacatttctaatagccttgggtttatttgcaaaggaagcttgaaaaatatgagaaaagttgcttgaagtgcattacaggtgtttgtgaagtcacataatctacggggctagggcgagagaggccagggatttgttcacagatacttgaattaattcatccaaatgtactgaggttaccacacacttgactacggatgtgatcaacactaacaaggaaacaaattcaaggacaacctgtctttgagccagggcaggcctcagacaccctgcctgtggccccgcctccacttcatcctgcccggaatgccagtgctccgagctcagacagaggaagccctgcagaaagttccatcaggctgtttcctaaaggatgtgtgaacgggagatgatgcactgtgttttgaaagttgtcattttaaagcattttagcacagttcatagtccacagttgatgcagcatcctgagattttaaatcctgaagtgtgggtggcgcacacaccaagtagggagctagtcaggcagtttgcttaaggaacttttgttctctgtctcttttccttaaaattgggggtaaggagggaaggaagagggaaagagatgactaactaaaatcatttttacagcaaaaactgctcaaagccatttaaattatatcctcattttaaaagttacatttgcaaatatttctccctatgataatgtagtcgatagtgtgcactctttctctctctctctctctctcacacacacacacacacacacacacacacacacagagacacggcaccattctgcctggggcactggaacacattcctgggggtcaccgatggtcagagtcactagaagttacctgagtatctctgggaggcctcatgtctcctgtgggctttttaccaccactgtgcaggagaacagacagaggaaatgtgtctccctccaaggccccaaagcctcagagaaagggtgtttctggttttgccttagcaatgcatcggtctctgaggtgacactctggagtggttgaagggccacaaggtgcagggttaatactcttgccagttttgaaatatagatgctatggttcagattgtttttaatagaaaactaaaggggcaggggaagtgaaaggaaagatggaggttttgtgcggctcgatggggcatttggaacttctttttaaagtcatctcatggtctccagttttcagttggaactctggtgtttaacacttaagggagacaaaggctgtgtccatttggcaaaacttccttggccacgagactctaggtgatgtgtgaagctgggcagtctgtggtgtggagagcagccatctgtctggccattcagaggattctaaagacatggctggatgcgctgctgaccaacatcagcacttaaataaatgcaaatgcaacatttctccctctgggccttgaaaatccttgcccttatcatttggggtgaaggagacatttctgtccttggcttcccacagccccaacgcagtctgtgtatgattcctgggatccaacgagccctcctattttcacagtgttctgattgctctcacagcccaggcccatcgtctgttctctgaatgcagccctgttctcaacaacagggaggtcatggaacccctctgtggaacccacaaggggagaaatgggtgataaagaatccagttcctcaaaaccttccctggcaggctgggtccctctcctgctgggtggtgctttctcttgcacaccactcccaccacggggggagagccagcaacccaaccagacagctcaggttgtgcatctgatggaaaccactgggctcaaacacgtgctttattctcctgtttatttttgctgttactttgaagcatggaaattcttgtttgggggatcttggggctacagtagtgggtaaacaaatgcccaccggccaagaggccattaacaaatcgtccttgtcctgaggggccccagcttgctcgggcgtggcacagtggggaatccaagggtcacagtatggggagaggtgcaccctgccacctgctaacttctcgctagacacagtgtttctgcccaggtgacctgttcagcagcagaacaagccagggccatggggacgggggaagttttcacttggagatggacaccaagacaatgaagatttgttgtccaaataggtcaataattctgggagactcttggaaaaaactgaatatattcaggaccaactctctccctcccctcatcccacatctcaaagcagacaatgtaaagagagaacatctcacacacccagctcgccatgcctactcattcctgaatttcaggtgccatcactgctctttctttcttctttgtcatttgagaaaggatgcaggaggacaattcccacagataatctgaggaatgcagaaaaaccagggcaggacagttatcgacaatgcattagaacttggtgagcatcctctgtagagggactccacccctgctcaacagcttggcttccaggcaagaccaaccacatctggtctctgccttcggtggcccacacacctaagcgtcatcgtcattgccatagcatcatgatgcaacacatctacgtgtagcactacgacgttatgtttgggtaatgtggggatgaactgcatgaggctctgattaaggatgtggggaagtgggctgcggtcactgtcggccttgcaaggccacctggaggcctgtctgttagccagtggtggaggagcaaggcttcaggaagggccagccacatgccatcttccctgcgatcaggcaaaaaagtggaattaaaaagtcaaacctttatatgcatgtgttatgtccattttgcaggatgaactgagtttaaaagaatttttttttctcttcaagttgctttgtcttttccatcctcatcacaagcccttgtttgagtgtcttatccctgagcaatctttcgatggatggagatgatcattaggtacttttgtttcaacctttattcctgtaaatatttctgtgaaaactaggagaacagagatgagatttgacaaaaaaaaattgaattaaaaataacacagtctttttaaaactaacataggaaagcctttcctattatttctcttcttagcttctccattgtctaaatcaggaaaacaggaaaacacagctttctagcagctgcaaaatggtttaatgccccctacatatttccatcaccttgaacaatagctttagcttgggaatctgagatatgatcccagaaaacatctgtctctacttcggctgcaaaacccatggtttaaatctatatggtttgtgcattttctcaactaaaaatagagatgataatccgaattctccatatattcactaatcaaagacactattttcatactagattcctgagacaaatactcactgaagggcttgtttaaaaataaattgtgttttggtctgttcttgtagataatgcccttctattttaggtagaagctctggaatccctttattgtgctgttgctcttatctgcaaggtggcaagcagttcttttcagcagattttgcccactattcctctgagctgaagttctttgcatagatttggcttaagcttgaattagatccctgcaaaggcttgctctgtgatgtcagatgtaattgtaaatgtcagtaatcacttcatgaatgctaaatgagaatgtaagtatttttaaatgtgtgtatttcaaatttgtttgactaattctggaattacaagatttctatgcaggatttaccttcatcctgtgcatgtttcccaaactgtgaggagggaaggctcagagatcgagcttctcctctgagttctaacaaaatggtgctttgagggtcagcctttaggaaggtgcagctttgttgtcctttgagctttctgttatgtgcctatcctaataaactcttaaacaca

SEQ ID NO: 699 - DNA, 1698 bp, Homo sapiens
agtgcgcgccggccgggcaaccctatgctggcgtaatcgggttcctccgagccgccgtaggactggttccggcgggctggtgaggaatggagccggtaggctgctgcggcgagtgccgcggctcctccgtagacccgcggagcaccttcgtgttgagtaacctggcggaggtggtggagcgtgtgctcaccttcctgcccgccaaggcgttgctgcgggtggcctgcgtgtgccgcttatggagggagtgtgtgcgcagagtattgcggacccatcggagcgtaacctggatctccgcaggcctggcggaggccggccacctggaggggcattgcttggttcgcgtggtagcagaggagcttgagaatgttcgcatcttaccacatacagttctttacatggctgattcagaaactttcattagtctggaagagtgtcgtggccataagagagcaaggaaaagaactagtatggaaacagcacttgcccttgagaagctattccccaaacaatgccaagtccttgggattgtgaccccaggaattgtagtgactccaatgggatcaggtagcaatcgacctcaggaaatagaaattggagaatctggttttgctttattattccctcaaattgaaggaataaaaatacaaccctttcattttattaaggatccaaagaatttaacattagaaagacatcaactcactgaagtaggtcttttagataaccctgaacttcgtgtggtccttgtctttggttataattgctgtaaggtgggagccagtaattatctgcagcaagtagtcagcactttcagtgatatgaatatcatcttggctggaggccaggtggacaacctgtcatcactgacttctgaaaagtatgtcttgtgtgcttctgatttcgtctgtgaatgaagggaaatggtctcaggttttgtcactttggggttaacaatttaaaaaacgtgtttaaagaattattaagataatagttcattccattttgtagtagacattggctaaggggcttactgaacataattctgcttacggttgaataattacatttttatatatattgtccttcaagaacttccttgagtcacattctccttaaaatttgacattgcctgttgatctttcctttgacagatgtggtactctgtgtgacctcaatgtgtcacctcctttctagtttcctcctttaaaggaaacacatggttagagtgtatctttatggcaaaacttctcagagcttctaatatgcccagtgctgtggaaatctggaaggagaatagcattacctgtgacagttcccaaatgtgtttggtcacaaaacttttttccacagaatgtcttgcaagtcgtactggtttttggaaattctgtattagatcttttgaaaggctttttcaagcttaaaaattgtggatcttttttgttactaaggcttttgctttcaaagataaaaatatttgctcttctgtcttgggagccattacttcctttccatcttgaatgaaaatacatatcattttgagtttgaaacaattaggtggacataaatatcatttgtttccagcaggaaaatcagaccctaccccaccctcaatgcttgtaaacactactatttgtttcccactctgtttaatatttgcatcctagagtggtgacatggggacagactgttgcagat

SEQ ID NO: 700 - DNA, 1463 bp, Homo sapiens
ggcactccagctaccgaagcactggagagtgtcatggaggcctacgagcaggtccaaaagggacccctgaagctgaaaggcgtcgcagagctgggagtgaccaagcggaagaagaaaaagaaggacaaagacaaagcgaaactcctggaagcaatgggaacgagcaaaaagaacgaggaggagaagcggcgcggcctggacaagcggaccccggcccaggcggccttcgagaaaatgcaggagaagcggcaaatggaaaggatcctaaagaaggcatccaaaacccacaagcagagagtggaggacttcaacagacacctggacacactcacggagcattacgacattcccaaagtcagctggacgaagtagccgcctgcccccagtatggagcagcatcgagggttcgcaaaaggccacactggggttgtgtgtgtttcctttggtatattctggaaacatggctacacacacccttgcatcttctgctacagactgcttttcgaagctgtgtaccctcattctggaacttgattaaagtaagatcgtccttgtactcagtttaggcttcttggcaacatacagaagatacacccttttcgtttggatggaaagtttctaagtttatccagaggtaaagcccattgtgtgtctgtgtcatgtaaaaatgttttcacccgagttgcatgtaacgctctgaggccagccagctgtcttctcctggatgagacagactccagagggtaaggagctagcgccatggtggcctgcagtatgcagagccccgcaggacccagcgtgggcgcccttccaagcttcctctagctttgggcctatgctgtcccctgcaggccctagggaagccacttgcaactatgcggccttcagacttcctcctcagccacctggccactgagacagcatagcctgggtaacggaacagccacctaaggcaagaatggaacggacacaccttgctcctttctgagcccgtttcccaaaaccccccttccaggtgcttctaatgggtgttgccatagcagacgctgctaatgcatcacagcattctttgaaatggaaccagacacagcctgcctctcaatcctcagctgggggctcctagcagcctcttgtatttactcagagttgacacatcacacagatcctgtttggcattcctaccttacggacgtctcaggggtgacaggaccagggcagagccccggtacaaacagacaaggctgcagtcaaatgggagggtccaggtgtccgtgttggagggctgggatcttgtagggcctgtgcgtcctggctgaggatcaaaccacatatgttattgggagaaacgatttctgttgacgtagatattgaaagaataatgaaggcagaagagaaaaacgaagtgtggaatttggggttgtcctgtgtaaattacacaataaagcaaaagtcagttattgtaa

SEQ ID NO: 701 - DNA, 6652 bp, Homo sapiens
gccagagccaggaggcagctgtgcgatctggatgtacctaaaccctccagggccacatagtgaccccaggccctggtcactccatgctttggagggtgcttttgtcaaagaggcctcctttccctcacccagagctggatttccaagaggctcccatacctagctgccctggcagactcccagggaggaaaaacagcgtggccttggcagctgccccgaggaaggagcccacaggtgacagggagaagccattgccattccctgtcctggcccccttcagcaaccctgaacactctgctccagccaaggtggtgagggcagctgttcctaaacagcgcaaaggcagcaaggttggtgactttggagatgcaatcaattggcccacacctggagagatagcccacaagagtgttcagccacagtcccacaagcctcagcctacccgtaaactgccacccaagaaggacatgaaggaacaggagaaaggagaagggagtgatagtaaggagagtccaaaaaccaaatcagatgaatcaggggaggaaaagaatggagatgaggattgccagcgaggcgggcagaagaagaaaggaaacaaacacaagtgggttccattacaaatagacatgaagcctgaagtgcccagagagaaactggcttcacgccccactcgcccaccggagcctagacacatacctgccaatcgcggagagatcaaagggtctgagtctgccacctacgtgcccgtggccccccccaccccagcctggcaaccagagatcaaaccggagcctgcctggcacgaccaggatgagacatcgagtgtgaagagtgatggggctggtggggcgcgggcttccttccgtggccgtggacgggggcgtggtcgcggccggggacgcggccggggtggcactcgaacccattttgactaccagtttggctaccgaaagtttgatggtgtggaggggcctcgtacgcccaagtacatgaacaacatcacctactactttgacaatgtcagcagcaccgagctttacagtgtggatcaggaactgctcaaagactacatcaagcgccagattgaatactacttcagcgtggacaatttagagcgagacttcttcctgcgaaggaaaatggatgctgatggtttcctacccatcacccttattgcttccttccaccgagtgcaggcccttaccactgacatttcactcatctttgcggccctaaaggacagcaaggtggtggagatcgttgatgagaaagttcgtaggagggaggaaccagaaaagtggcctcttcccccaatagtggattattcacagactgatttctcccagcttctcaactgccctgaatttgttccccgtcagcactaccaaaaggagacagagtcggcacctggctctcctcgtgcagtcaccccagtgccaaccaaaacagaggaggtcagcaacctaaagacactacccaagggcctgtctgccagcctgcctgacctggattctgagaactggattgaagtgaagaagaggcctcggccatccccagcacggcccaagaagtcagaggagtccagattttcccacctgacctctctgcctcagcagctgccttcccagcagctgatgtccaaggatcaggatgagcaagaggaactggattttctgtttgacgaggagatggagcagatggatgggcggaagaacaccttcactgcctggtctgatgaggaatctgactatgagattgatgacagggatgtcaacaagatcctcattgtcacccagacaccacattacatgcgccggcacccagggggggaccgcacaggcaaccacacctcgcgtgccaagatgagcgccgaactggccaaggtcattaatgatggcctcttctactatgagcaggacctgtgggctgaaaagtttgaacctgagtattcccagatcaagcaagaagtcgagaacttcaaaaaggtcaatatgatcagccgggagcagtttgacacactgacccctgagccccctgtggatcccaaccaggaagttcctcctgggccacctcggttccagcaagttcctacggatgccctggccaacaagttgtttggtgctcctgagccctccaccatcgcccgctctctaccaaccactgtcccagagtcaccaaactaccgcaacaccaggacccctcgcactccccggacaccacagctcaaagactcaagccagacatcacggttttacccagtggtgaaagaaggacggacactggatgccaagatgcctcgaaaaagaaagacaagacacagttcaaacccacccttggagagccatgtgggctgggtgatggattcccgtgagcacaggccccgtactgcttccatcagctccagcccctcagaagggacgcctacagttggcagctatggctgtacccctcagtcattgcccaagttccagcatccttcccatgaactgctcaaggaaaatggcttcacacaacacgtctaccataagtatcgtaggcgctgccttaatgagcggaaacgcttgggcattggccagtctcaggagatgaacacactcttccgcttctggtccttcttcctccgagatcacttcaacaaaaagatgtatgaggagttcaagcagctggctctggaggacgccaaagaaggctacagatatggtttggagtgcctttttcgatactacagttatggcctggaaaagaagttccggctggacatattcaaggattttcaggaggaaacggtgaaggactatgaagctggccaactgtatgggctggagaagttctgggccttcttgaaatattccaaagccaaaaatttggacattgaccccaaactgcaagaatacctcggcaaattccgacgtcttgaagacttccgagtagatccccccatgggtgaggagggcaaccacaagcgacactcagtggtagcaggaggtggcggcggtgagggcaggaagcggtgcccctcccagtcttccagcaggcctgctgccatgatcagccaaccccctacaccacccaccggccagcctgtccgggaagatgccaaatggacaagccagcactcgaacacacagactttgggaaagtgaaaagctccttagccctggggcttgaggggggaaaggggtagggtgggtaagagtccatgggggtgcccagtcccaggaaaggggacaatgaagggacaggcctggagttactaggacaggcctttgtgctgagtagcaatgtatacaccatttgggctatcagaggtacccctgggcaggagcctctacatccccttccccctcctctctccatgactcttgacatcctagcttcttctaaggggggagggaaaggggggagatttttatatatatatacatatatatatatcaagttttaaattattgatagttcatctggattaccaaaatcactctgcagccctgcccgaggctagtaggctgcaaccctggtccccacccctaacctcctgctccccctcaagccaactatgcagcccacaagaaggccctgcgggcccccccattgcccagcactgtctcatagaaggctctggtggtacctctgggccccaggagcatcagccccttgatcatctggggtttgtcatcaccatattttctccctgctgttcccaccatgcccttctgccatcttctgggagaaggaaaccaaaggatctaaaactggggtttgggggaaggtttcagcctctccccactccccttgccccacaccctttactccccagcccagagagacgctgcttttaccaggaaagactattgaaagatgttttattttatttttctctgacctttccatccttgaaaaaatggggaaaaaagaagaaaaaagacaaaatcgaccataaaagaccaaaaaaaaaaaaaaaatcagaaaacccccacctaatccacagaaagtaatgtctttcccctccccttggaatttttgttttgtttttggaaataatatttttttaaaagttgccttattgtggagcgggaatctgaaatacccaaatgcctgttttcctcggtggagtcaacccgaagagctcccaccttctctggatgtgcctgggcttggactggctagaatctttctctggactgttgcatgtacagtgcctccatcctggaggcaagagagttgggagtggctcgaatcagagccgtgcccaagatatccctgctgttgcatcgtttgaagctgacgtcctgtgtctgtacactgctgccactgttgtgtcctcgctctgcttgctgttgcctcacgccaggccccgtcctgccgtgacacccttcatcctacccttggaaccccaaggccaagttggttcaaactgttggagaacagagttggcctgcatctggaacacacttgtcctcagcttaccatctcctcacaccccagagtggaaaggtgaacacctgcagctgaggcttggaaacgtttcttgtgttgccctgaaaaatctttgagacctcagggaggctctgtctctcttaaaaggtggagaaagatgccattctctccctaaggtctggtggagtctccccatcttgcatacccttctgcaagccatctatctctgctcactctccaattgacccgcctgggaacaagggatgaggaggagttgggggctggggggaatcctgccagttggtgaagccctgtggcaggaaggtatatgtggacatagagtatacctgattctctttcttcagccactgactgcttgggttgggctgtgaatgataatggaatggctggagtctgctgttgtcagaaggcagggagggtgatgaaggactgacccacatggactgggatgtgtgtcggttatgggcatgactgcacgttcactctcagtgggatctgggcaacatggagttcattgtcctgttgcttacttactgcaatgtctttggccctccttttcaactggttcctctgttgggcccaaaggttgggagtaggagacagtatcccaggctgacaagggcttgccctttaccttgggcaccttgttaatttttagcctgtgcccttccccacctttgccctcccagtggttggtatgtgggaagcccatctcagttcctgtgacttcatgtctcaaaccaaggatgagcgtctggtctctgctatgatggtggtatccgaggcctttccctgcccagtctggtgcctgccccacattgtaccggacactggattcctggacccccttctcctttcctttctttccttcaggtcacgcagccctgtactgtatccagcaccacagaaacctcagtgtttttcctctgctggtttggggcacaaggaagccttagggtatggggaaaggctgttattacctagagtttactcccaggccagggggctgccatcttcttcacagacatccctgaaaggaagcccctttggggcagggaggtgaggacttcatctcaacatcggctggtggttggtaggggagctttttcttttctttcctttttttttgtttttgtttttgtttttgtttttggtaacatgttaggagttaatgttgcaaagagtagtttacatcttcactttctgaagacacttgaatttaggaccgatgtatctgtgacaagcatgccagaagtggcaggggccatcagggctaaccacttcacacctaccatcgtcccatggggatccaagacctgagataaagcaacagcctgcccagatccctctgttcatcctatcccttccaaggttggtccatgccaacataacctctgggcatcagacatcagcaggtctgtgtgcctcagccctgttaaggggcaggtttctctttagccctcttcctgcacttgggagcaaaggcactaccagtagagaagggccatccagccgtgccccagcctggacccctggggctcagatagaggtgctgagcccctgtgtcaaagttgttaaatgtttttgttttgttccattgtagctctttttttttttttttcccctttcctggtgattgattttacaaaagaaagtaagctgcttagaaggccctggaagggaagtgaggaggagggacaaggaagatgactagttacggagggtgagggttgttttttgccaaaaagcctgggtagagtgatctgaattatctggcaccctcctgaatggaaccccagagtacctcctgtgtggaagggtccctggattttccctaacacccaccctctcccccttcagccatgctgatggcagagaagataagaacttggagcccatttctcactggagaggaaaacttgtcatctggctttgcggagaaggttccaccttacgctcgtagtacattatctttactatgtgctaggatatcatatttaaaaggacaaaaaaatgtaaaatacttgaatgagcttgtattataacattaatattattgagagtatctgctttccaggctgaagtgattcattcattattctagtcctgctttagtcctttgtaatttgtggtaattatgcttttctttttaatacaaaaaaatgtataaaaataaacacttgaaaaggcaaaa

SEQ ID NO: 702 - DNA, 1902 bp, Homo sapiens
actcctcacaccacttaacagccacttgtttcatcccacctgggcattaggttgacttcaaagatgcctcagttactgcaaaacattaatgggatcatcgaggccttcaggcgctatgcaaggacggagggcaactgcacagcgctcacccgaggggagctgaaaagactcttggagcaagagtttgccgatgtgattgtgaaaccccacgatccagcaactgtggatgaggtcctgcgtctgctggatgaagaccacacagggactgtggaattcaaggaattcctggtcttagtgtttaaagttgcccaggcctgtttcaagacactgagcgagagtgctgagggagcctgcggctctcaagagtctggaagcctccactctggggcctcgcaggagctgggcgaaggacagagaagtggcactgaagtgggaagggcggggaaagggcagcattatgaggggagcagccacagacagagccagcagggttccagagggcagaacaggcctggggttcagacccagggtcaggccactggctctgcgtgggtcagcagctatgacaggcaagctgagtcccagagccaggaaagaataagcccgcagatacaactctctgggcagacagagcagacccagaaagctggagaaggcaagaggaatcagacaacagagatgaggccagagagacagccacagaccagggaacaggacagagcccaccagacaggtgagactgtgactggatctggaactcagacccaggcaggtgccacccagactgtggagcaggacagcagccaccagacaggaagaaccagcaagcagacacaggaggccaccaatgaccagaacagagggactgagacccacggtcaaggcaggagccagaccagccaggctgtgacaggaggacatgctcagatacaggcagggacacacacccagacacccacccagaccgtggagcaggacagcagccaccagacaggaagcaccagcacccagacacaggagtccaccaatggccagaacagagggactgagatccacggtcaaggcaggagccagaccagccaggctgtgacaggaggacacactcagatacaggcagggtcacacaccgagactgtggagcaggacagaagccaaactgtaagccacggaggggctagagaacagggacagacccagacgcagccaggcagtggtcaaagatggatgcaagtgagcaaccctgaggcaggagagacagtaccgggaggacaggcccagactggggcaagcactgagtcaggaaggcaggagtggagcagcactcacccaaggcgctgtgtgacagaagggcagggagacagacagcccacagtggttggtgaggaatgggttgatgaccactcaagggagacagtgatcctcaggctggaccagggcaacttgcataccagtgtttcctcagcacagggccaggatgcagcccagtcagaagagaagcgaggcatcacagctagagagctgtattcctacttgagaagcaccaagccatgacttccccgactccaatgtccagtactggaagaagacagctggagagagtttggcttgtcctgcatggccaatccagtgggtgcatccctggacatcagctcttcattatgcagcttcccttttaggtctttctcaatgagataatttctgcaaggagctttctatcctgaactcttctttcttacctgctttgcggtgcagaccctctcaggagcaggaagactcagagcaagtcacccctttgtactgaattgtcctcatcttgtggggggtttcaggactatttttatctctgacatctctctattgccccatctaccctaatgcatcaataaaaccttaagccactgg

SEQ ID NO: 703 - DNA, 5003 bp, Homo sapiens
acttcatctcagaagactccagatataggatcactccatgccatcaagaaagttgatgctattgggcccatctcaagctgatcttggcacctctcatgctctgctctcttcaaccagacctctacattccattttggaagaagactaaaaatggtgtttccaatgtggacactgaagagacaaattcttatcctttttaacataatcctaatttccaaactccttggggctagatggtttcctaaaactctgccctgtgatgtcactctggatgttccaaagaaccatgtgatcgtggactgcacagacaagcatttgacagaaattcctggaggtattcccacgaacaccacgaacctcaccctcaccattaaccacataccagacatctccccagcgtcctttcacagactggaccatctggtagagatcgatttcagatgcaactgtgtacctattccactggggtcaaaaaacaacatgtgcatcaagaggctgcagattaaacccagaagctttagtggactcacttatttaaaatccctttacctggatggaaaccagctactagagataccgcagggcctcccgcctagcttacagcttctcagccttgaggccaacaacatcttttccatcagaaaagagaatctaacagaactggccaacatagaaatactctacctgggccaaaactgttattatcgaaatccttgttatgtttcatattcaatagagaaagatgccttcctaaacttgacaaagttaaaagtgctctccctgaaagataacaatgtcacagccgtccctactgttttgccatctactttaacagaactatatctctacaacaacatgattgcaaaaatccaagaagatgattttaataacctcaaccaattacaaattcttgacctaagtggaaattgccctcgttgttataatgccccatttccttgtgcgccgtgtaaaaataattctcccctacagatccctgtaaatgcttttgatgcgctgacagaattaaaagttttacgtctacacagtaactctcttcagcatgtgcccccaagatggtttaagaacatcaacaaactccaggaactggatctgtcccaaaacttcttggccaaagaaattggggatgctaaatttctgcattttctccccagcctcatccaattggatctgtctttcaattttgaacttcaggtctatcgtgcatctatgaatctatcacaagcattttcttcactgaaaagcctgaaaattctgcggatcagaggatatgtctttaaagagttgaaaagctttaacctctcgccattacataatcttcaaaatcttgaagttcttgatcttggcactaactttataaaaattgctaacctcagcatgtttaaacaatttaaaagactgaaagtcatagatctttcagtgaataaaatatcaccttcaggagattcaagtgaagttggcttctgctcaaatgccagaacttctgtagaaagttatgaaccccaggtcctggaacaattacattatttcagatatgataagtatgcaaggagttgcagattcaaaaacaaagaggcttctttcatgtctgttaatgaaagctgctacaagtatgggcagaccttggatctaagtaaaaatagtatattttttgtcaagtcctctgattttcagcatctttctttcctcaaatgcctgaatctgtcaggaaatctcattagccaaactcttaatggcagtgaattccaacctttagcagagctgagatatttggacttctccaacaaccggcttgatttactccattcaacagcatttgaagagcttcacaaactggaagttctggatataagcagtaatagccattattttcaatcagaaggaattactcatatgctaaactttaccaagaacctaaaggttctgcagaaactgatgatgaacgacaatgacatctcttcctccaccagcaggaccatggagagtgagtctcttagaactctggaattcagaggaaatcacttagatgttttatggagagaaggtgataacagatacttacaattattcaagaatctgctaaaattagaggaattagacatctctaaaaattccctaagtttcttgccttctggagtttttgatggtatgcctccaaatctaaagaatctctctttggccaaaaatgggctcaaatctttcagttggaagaaactccagtgtctaaagaacctggaaactttggacctcagccacaaccaactgaccactgtccctgagagattatccaactgttccagaagcctcaagaatctgattcttaagaataatcaaatcaggagtctgacgaagtattttctacaagatgccttccagttgcgatatctggatctcagctcaaataaaatccagatgatccaaaagaccagcttcccagaaaatgtcctcaacaatctgaagatgttgcttttgcatcataatcggtttctgtgcacctgtgatgctgtgtggtttgtctggtgggttaaccatacggaggtgactattccttacctggccacagatgtgacttgtgtggggccaggagcacacaagggccaaagtgtgatctccctggatctgtacacctgtgagttagatctgactaacctgattctgttctcactttccatatctgtatctctctttctcatggtgatgatgacagcaagtcacctctatttctgggatgtgtggtatatttaccatttctgtaaggccaagataaaggggtatcagcgtctaatatcaccagactgttgctatgatgcttttattgtgtatgacactaaagacccagctgtgaccgagtgggttttggctgagctggtggccaaactggaagacccaagagagaaacattttaatttatgtctcgaggaaagggactggttaccagggcagccagttctggaaaacctttcccagagcatacagcttagcaaaaagacagtgtttgtgatgacagacaagtatgcaaagactgaaaattttaagatagcattttacttgtcccatcagaggctcatggatgaaaaagttgatgtgattatcttgatatttcttgagaagccctttcagaagtccaagttcctccagctccggaaaaggctctgtgggagttctgtccttgagtggccaacaaacccgcaagctcacccatacttctggcagtgtctaaagaacgccctggccacagacaatcatgtggcctatagtcaggtgttcaaggaaacggtctagcccttctttgcaaaacacaactgcctagtttaccaaggagaggcctggctgtttaaattgttttcatatatatcacaccaaaagcgtgttttgaaattcttcaagaaatgagattgcccatatttcaggggagccaccaacgtctgtcacaggagttggaaagatggggtttatataatgcatcaagtcttctttcttatctctctgtgtctctatttgcacttgagtctctcacctcagctcctgtaaaagagtggcaagtaaaaaacatggggctctgattctcctgtaattgtgataattaaatatacacacaatcatgacattgagaagaactgcatttctacccttaaaaagtactggtatatacagaaatagggttaaaaaaaactcaagctctctctatatgagaccaaaatgtactagagttagtttagtgaaataaaaaaccagtcagctggccgggcatggtggctcatgcttgtaatcccagcactttgggaggccgaggcaggtggatcacgaggtcaggagtttgagaccagtctggccaacatggtgaaaccccgtctgtactaaaaatacaaaaattagctgggcgtggtggtgggtgcctgtaatcccagctacttgggaggctgaggcaggagaatcgcttgaacccgggaggtggaggtggcagtgagccgagatcacgccactgcaatgcagcccgggcaacagagctagactgtctcaaaagaacaaaaaaaaaaaaacacaaaaaaactcagtcagcttcttaaccaattgcttccgtgtcatccagggccccattctgtgcagattgagtgtgggcaccacacaggtggttgctgcttcagtgcttcctgctctttttccttgggcctgcttctgggttccatagggaaacagtaagaaagaaagacacatccttaccataaatgcatatggtccacctacaaatagaaaaatatttaaatgatctgcctttatacaaagtgatattctctacctttgataatttacctgcttaaatgtttttatctgcactgcaaagtactgtatccaaagtaaaatttcctcatccaatatctttcaaactgttttgttaactaatgccatatatttgtaagtatctgcacacttgatacagcaacgttagatggttttgatggtaaaccctaaaggaggactccaagagtgtgtatttatttatagttttatcagagatgacaattatttgaatgccaattatatggattcctttcattttttgctggaggatgggagaagaaaccaaagtttatagaccttcacattgagaaagcttcagttttgaacttcagctatcagattcaaaaacaacagaaagaaccaagacattcttaagatgcctgtactttcagctgggtataaattcatgagttcaaagattgaaacctgaccaatttgctttatttcatggaagaagtgatctacaaaggtgtttgtgccatttggaaaacagcgtgcatgtgttcaagccttagattggcgatgtcgtattttcctcacgtgtggcaatgccaaaggctttactttacctgtgagtacacactatatgaattatttccaacgtacatttaatcaataagggtcacaaattcccaaatcaatctctggaataaatagagaggtaattaaattgctggagccaacta

SEQ ID NO: 704 - DNA, 3352 bp, Homo sapiens
attctctgagccgctgctgcccctgtgggaagggacctcgagtgtgaagcatccttccctgtagctgctgtccagtctgcccgccagaccctctggagaagcccctgccccccagcatgggtttctgccgcagcgccctgcacccgctgtctctcctggtgcaggccatcatgctggccatgaccctggccctgggtaccttgcctgccttcctaccctgtgagctccagccccacggcctggtgaactgcaactggctgttcctgaagtctgtgccccacttctccatggcagcaccccgtggcaatgtcaccagcctttccttgtcctccaaccgcatccaccacctccatgattctgactttgcccacctgcccagcctgcggcatctcaacctcaagtggaactgcccgccggttggcctcagccccatgcacttcccctgccacatgaccatcgagcccagcaccttcttggctgtgcccaccctggaagagctaaacctgagctacaacaacatcatgactgtgcctgcgctgcccaaatccctcatatccctgtccctcagccataccaacatcctgatgctagactctgccagcctcgccggcctgcatgccctgcgcttcctattcatggacggcaactgttattacaagaacccctgcaggcaggcactggaggtggccccgggtgccctccttggcctgggcaacctcacccacctgtcactcaagtacaacaacctcactgtggtgccccgcaacctgccttccagcctggagtatctgctgttgtcctacaaccgcatcgtcaaactggcgcctgaggacctggccaatctgaccgccctgcgtgtgctcgatgtgggcggaaattgccgccgctgcgaccacgctcccaacccctgcatggagtgccctcgtcacttcccccagctacatcccgataccttcagccacctgagccgtcttgaaggcctggtgttgaaggacagttctctctcctggctgaatgccagttggttccgtgggctgggaaacctccgagtgctggacctgagtgagaacttcctctacaaatgcatcactaaaaccaaggccttccagggcctaacacagctgcgcaagcttaacctgtccttcaattaccaaaagagggtgtcctttgcccacctgtctctggccccttccttcgggagcctggtcgccctgaaggagctggacatgcacggcatcttcttccgctcactcgatgagaccacgctccggccactggcccgcctgcccatgctccagactctgcgtctgcagatgaacttcatcaaccaggcccagctcggcatcttcagggccttccctggcctgcgctacgtggacctgtcggacaaccgcatcagcggagcttcggagctgacagccaccatgggggaggcagatggaggggagaaggtctggctgcagcctggggaccttgctccggccccagtggacactcccagctctgaagacttcaggcccaactgcagcaccctcaacttcaccttggatctgtcacggaacaacctggtgaccgtgcagccggagatgtttgcccagctctcgcacctgcagtgcctgcgcctgagccacaactgcatctcgcaggcagtcaatggctcccagttcctgccgctgaccggtctgcaggtgctagacctgtcccacaataagctggacctctaccacgagcactcattcacggagctaccgcgactggaggccctggacctcagctacaacagccagccctttggcatgcagggcgtgggccacaacttcagcttcgtggctcacctgcgcaccctgcgccacctcagcctggcccacaacaacatccacagccaagtgtcccagcagctctgcagtacgtcgctgcgggccctggacttcagcggcaatgcactgggccatatgtgggccgagggagacctctatctgcacttcttccaaggcctgagcggtttgatctggctggacttgtcccagaaccgcctgcacaccctcctgccccaaaccctgcgcaacctccccaagagcctacaggtgctgcgtctccgtgacaattacctggccttctttaagtggtggagcctccacttcctgcccaaactggaagtcctcgacctggcaggaaaccagctgaaggccctgaccaatggcagcctgcctgctggcacccggctccggaggctggatgtcagctgcaacagcatcagcttcgtggcccccggcttcttttccaaggccaaggagctgcgagagctcaaccttagcgccaacgccctcaagacagtggaccactcctggtttgggcccctggcgagtgccctgcaaatactagatgtaagcgccaaccctctgcactgcgcctgtggggcggcctttatggacttcctgctggaggtgcaggctgccgtgcccggtctgcccagccgggtgaagtgtggcagtccgggccagctccagggcctcagcatctttgcacaggacctgcgcctctgcctggatgaggccctctcctgggactgtttcgccctctcgctgctggctgtggctctgggcctgggtgtgcccatgctgcatcacctctgtggctgggacctctggtactgcttccacctgtgcctggcctggcttccctggcgggggcggcaaagtgggcgagatgaggatgccctgccctacgatgccttcgtggtcttcgacaaaacgcagagcgcagtggcagactgggtgtacaacgagcttcgggggcagctggaggagtgccgtgggcgctgggcactccgcctgtgcctggaggaacgcgactggctgcctggcaaaaccctctttgagaacctgtgggcctcggtctatggcagccgcaagacgctgtttgtgctggcccacacggaccgggtcagtggtctcttgcgcgccagcttcctgctggcccagcagcgcctgctggaggaccgcaaggacgtcgtggtgctggtgatcctgagccctgacggccgccgctcccgctacgtgcggctgcgccagcgcctctgccgccagagtgtcctcctctggccccaccagcccagtggtcagcgcagcttctgggcccagctgggcatggccctgaccagggacaaccaccacttctataaccggaacttctgccagggacccacggccgaatagccgtgagccggaatcctgcacggtgccacctccacactcacctcacctctgcctgcctggtctgaccctcccctgctcgcctccctcaccccacacctgacacagagcaggcactcaataaatgctaccgaaggcta

SEQ ID NO: 705 - DNA, 1997 bp, Homo sapiens
agagagctgtttactaggcacgactgcgaaggcaagggggcaccagctcaggactgcatctgcctgccatttcccttccactcctcctttctggagtctgacattagaaagccagcgagaaggaagattcaaacaaccaaccctgatttcctgcttctccttttcatgagtgttcctgtggtctctgcacctcctttctgtcccccggcagagggcagtagagatggccggcccaaggcctcggtggcgcgaccagctgctgttcatgagcatcatagtcctcgtgattgtggtcatctgcctgatgttttacgctcttctctgggaggctggcaacctcactgacctgcccaacctgagaatcggcttctataacttctgcctgtggaatgaggacaccagcaccctacagtgtcaccagttccctgagctggaagccctgggggtgcctcgggttggcctgggcctggccaggcttggcgtgtacgggtccctggtcctcaccctctttgccccccagcctctcctcctagcccagtgcaacagtgatgagagagcgtggcggctggcagtgggcttcctggctgtgtcctctgtgctgctggcaggcggcctgggcctcttcctctcctatgtgtggaagtgggtcaggctctccctcccggggcctgggtttctagctctgggcagcgcccaggccttactcatcctcttgcttatagccatggctgtgttccctctgagggctgagagggctgagagcaagcttgagagctgctaaaggcttacgtgattgcaagggttcagttccaaccatggtcagaggtggcacatctgctcagccatctcattttacagctaacgctgatctccagctccagcgatggaacccactacagaggaggtggggcccctgtgtcaaagaggccgaggggcagcaagggcagccagggcacctgtgacttcttagtacaagattgtctgtccttcaggacttccaaggctcccaaagactccctaaaccatgcagctcattgtcacaccaattcctgctttaattaatggatctgagcaaatcttcctctagcttcaggagggtggggagggagtgattgctgtcatggggccagacttccaggctgatttgccaaatgccaaaatgaaacctagcaaagaacttacggcaacaaacgaggacattaaaagagcgagcacctcagtgtctctggggacatggttaaggagcttccactcagcccaccatagtgagtgggccgccataagccatcactggaactccaaccccagaggtccaggagtgatctctgagtgactcaacaaagacaggacacatggggtacaaagacaaggcttgactgcttcaaagcttccctggacctgaagccagacagggcagaggcgtccgctgacaaatcactcccatgatgagaccctggaggactccaaatcctcgctgtgaacaggactggacggctgcacacaaacaaacgctgccaccctccacttcccaacccagaacttggaaagacattagcacaacttacgcattggggaattgtgtgtattttctagcacttgtgtattggaaaacctgtatggcagtgatttattcatatattcctgtccaaagccacactgaaaacagaggcagagacatgtactctggtgtgatctcttgtcctcagtgtctcttctgggctcctgtccctcttgctttatagctagctgcccggggaccaaggtacaggtgaaagcaaggtagcagcttgcgggaggaggcctgtctggcttaccagtctatacactgtggcctcaacctcccagacagggcagagaactgtgggcagctcgtttgctttctaggctggctggagaggtgggagctcattgatagactcatgatggaaactatttttgaaacaggcttcctccttcaggagagatcatgcggactaaactgtagcaattccagtgca

SEQ ID NO: 706 - DNA, 2195 bp, Homo sapiens
agaaagagattaccagccacagacgggtcatgagcgcggtattactgctggccctcctggggttcatcctcccactgccaggagtgcaggcgctgctctgccagtttgggacagttcagcatgtgtggaaggtgtccgacctgccccggcaatggacccctaagaacaccagctgcgacagcggcttggggtgccaggacacgttgatgctcattgagagcggaccccaagtgagcctggtgctctccaagggctgcacggaggccaaggaccaggagccccgcgtcactgagcaccggatgggccccggcctctccctgatctcctacaccttcgtgtgccgccaggaggacttctgcaacaacctcgttaactccctcccgctttgggccccacagcccccagcagacccaggatccttgaggtgcccagtctgcttgtctatggaaggctgtctggaggggacaacagaagagatctgccccaaggggaccacacactgttatgatggcctcctcaggctcaggggaggaggcatcttctccaatctgagagtccagggatgcatgccccagccagtttgcaacctgctcaatgggacacaggaaattgggcccgtgggtatgactgagaactgcgatatgaaagattttctgacctgtcatcgggggaccaccattatgacacacggaaacttggctcaagaacccactgattggaccacatcgaataccgagatgtgcgaggtggggcaggtgtgtcaggagacgctgctgctcctagatgtaggactcacatcaaccctggtggggacaaaaggctgcagcactgttggggctcaaaattcccagaagaccaccatccactcagcccctcctggggtgcttgtggcctcctatacccacttctgctcctcggacctgtgcaatagtgccagcagcagcagcgttctgctgaactccctccctcctcaagctgcccctgtcccaggagaccggcagtgtcctacctgtgtgcagccccttggaacctgttcaagtggctccccccgaatgacctgccccaggggcgccactcattgttatgatgggtacattcatctctcaggaggtgggctgtccaccaaaatgagcattcagggctgcgtggcccaaccttccagcttcttgttgaaccacaccagacaaatcgggatcttctctgcgcgtgagaagcgtgatgtgcagcctcctgcctctcagcatgagggaggtggggctgagggcctggagtctctcacttggggggtggggctggcactggccccagcgctgtggtggggagtggtttgcccttcctgctaactctattacccccacgattcttcaccgctgctgaccacccacactcaacctccctctgacctcataacctaatggccttggacaccagattctttcccattctgtccatgaatcatcttccccacacacaatcattcatatctactcacctaacagcaacactggggagagcctggagcatccggacttgccctatgggagaggggacgctggaggagtggctgcatgtatctgataatacagaccctgtcctttctcccagtgctgggatttctccatgtgagggggcagcaggacacccagggatctagcgtgggggaggagaggagcctaatgagaaaatgaccatctaaagcctgcccttcattggtctggttcacgtctccaaaccagcttggatggtagcagagacttcagggtgctccagccaaacgtatttgggcatcaccatgacctgggaggggaagatgcactgagacgtatgaggcttccagcctagcagccagggccctagcacaaacaggaggctcgccccatctgagcaactgcaggagaggttagtacagtcatgcattgcttaacgacagggacgtgtcgttagaaatgtgtcgttaggtgattttatgaccataggaacattgtagcgtgcacttacaccaacccagatggtacagcccaatacacacccaggatggacgctagagtcgactgctcctaggctacaagcctgcagtgcatgttatggtgtgaatactgcaggcaatcttaacaccacggcaagtatttgtgcatctacacacatctaaacatagaaaaggtacagcataaatacactattgtcatctcagcaga

SEQ ID NO: 707 - DNA, 1560 bp, Homo sapiens
gtacaggtggtctcttgggttccggtaaggcggcggctgcggaactcccgtggaggggccggtgggccctcgggcctgacgatggcagtggccactgcggcggcagtactggccgctctgggcggggcgctgtggctggcggcccgccggttcgtggggcccagggtccagcggctgcgcagaggcggggaccccggcctcatgcacgggaagactgtgctgatcaccggggcgaacagcggcctgggccgcgccacggccgccgagctactgcgcctgggagcgcgggtgatcatgggctgccgggaccgcgcgcgcgccgaggaggcggcgggtcagctccgccgcgagctccgccaggccgcggagtgcggcccagagcctggcgtcagcggggtgggcgagctcatagtccgggagctggacctcgcctcgctgcgctcggtgcgcgccttctgccaggaaatgctccaggaagagcctaggctggatgtcttgatcaataacgcagggatcttccagtgcccttacatgaagactgaagatgggtttgagatgcagttcggagtgaaccatctggggcactttctactcaccaatcttctccttggactcctcaaaagttcagctcccagcaggattgtggtagtttcttccaaactttataaatacggagacatcaattttgatgacttgaacagtgaacaaagctataataaaagcttttgttatagccggagcaaactggctaacattctttttaccagggaactagcccgccgcttagaaggcacaaatgtcaccgtcaatgtgttgcatcctggtattgtacggacaaatctggggaggcacatacacattccactgttggtcaaaccactcttcaatttggtgtcatgggcttttttcaaaactccagtagaaggtgcccagacttccatttatttggcctcttcacctgaggtagaaggagtgtcaggaagatactttggggattgtaaagaggaagaactgttgcccaaagctatggatgaatctgttgcaagaaaactctgggatatcagtgaagtgatggttggcctgctaaaataggaacaaggagtaaaagagctgtttataaaactgcatatcagttatatctgtgatcaggaatggtgtggattgagaacttgttacttgaagaaaaagaattttgatattggaatagcctgctaagaggtacatgtgggtattttggagttactgaaaaattatttttgggataagagaatttcagcaaagatgttttaaatatatatagtaagtataatgaataataagtacaatgaaaaatacaattatattgtaaaattataactgggcaagcatggatgacatattaatatttgtcagaattaagtgactcaaagtgctatcgagaggtttttcaagtatctttgagtttcatggccaaagtgttaactagttttactacaatgtttggtgtttgtgtggaaattatctgcctggtgtgtgcacacaagtcttacttggaataaatttactggtacaaattcttaa

SEQ ID NO: 708 - DNA, 493 bp, Homo sapiens
gtggttgctcgtagtgagttgcgctcgctatgtctggacgtggcaagcagggaggcaaagcccgcgctaaggccaagactcgctcttctagggccggtctccagttccccgtgggccgagtgcaccgcctgctccgcaaaggcaactatgccgagcgggtcggggccggcgcgccggtgtatctggcagcggtgctggagtacctgaccgccgagatcctggaactggcgggcaacgcggcccgcgacaacaagaagacccgcatcatcccgcgtcatctccaactggccatccgcaacgacgaggagctcaacaagctgctgggcaaagtcaccatcgcacagggcggtgtcctgcccaacattcaggccgtgctactgcccaaaaagactgagagccaccacaaggcgaagggcaagtaactatctgtactagtttgtggcagctcaagtaaaatcgagtccaaaccaacggctcttttcagggccaccca

SEQ ID NO: 709 - DNA, 487 bp, Homo sapiens
aactgcgaccggggttcagcgctcgggtgaggagctggtggcgtcggcaggttcgaggcgattcgaggtgagggggtcaagcggagaggctcggagtcggagaaagctgtcgcgacccagccacccagggtctggggtcggtgggagctccagctaggatgatcgaggttgtttgcaacgaccgtctggggaagaaggtccgcgttaaatgcaacacggatgataccatcggggaccttaagaagctgattgcagcccaaactggtacccgttggaacaagattgtcctgaagaagtggtacacgatttttaaggaccacgtgtctctgggggactatgaaatccacgatgggatgaacctggagctttattatcaatagatgagaatcctcatcttcctgccccgctttcctctcccatcctcatcccccacactgggatagatgcttgtttgtaaaaactcaccttaataaagacttagatgttg

SEQ ID NO: 710 - DNA, 7565 bp, Homo sapiens
ctttcactcttgggcctagcgaggcagcttatttttcctttttctttcattggtcacagttatttcttttcagtgtgtcatcttctctaagtttctgagggagtgttagcttgaggccttgccttgacataatcagatataatcagaaaaatgaaaaattccataggaaagagaactattttagccaaggtgtgcgagagaaataccgccactttcaagcactgttttcttctactggagtctgctcaatagggacgtcagctttgctggggcttcctttgacaagagaatcagaaccgactggtgacatttgtttcaatgaaagcaacagtgtgaagagtaagtagtttttcctattattcatctcactcagtggagataatgaactcctctccactgccaagatgagaaactaccatttcttacacatggacacaaagatgagaacaataaacactgagacttcaaaaaggagggaaggagaaagaggaacaagacttgaaatctacctatcagaacttgcaatttattctgatcaacaatttgcccagctaaagtactacatctgccccctcttcctgtggctgtaggggcacagcaaaggtcactggtctaacctccttaaagggactccgctaacagaaaccaccaaatggagtggagaaaaagaaaagggatcccctatccccaactccagccatctagattaagaaaagccagctgactggacagtagcacagcccagtcacctcatggacaaatttcctaggaaagaacctctcccatctattctacttatcactctcctttgaggttccggccacagatcttcgcctgctgctggaaatggccctctcagtggactcatcgtggcatcggtggcagtggagagtcagagatggcttcccccattgtccatcggaaaccacaccgctgctctctccagagaaagggagacagagctacaacttgacacagcagcgggtcgtgttccccaacaacagcatattccatcaagattgggaagaggtctccaggagataccctggcaacagaacctgcacaaccaaatacaccctcttcaccttcctgccccggaatctctttgagcaatttcatagatgggctaacctctatttcctgttcctggtgattttgaactggatgccctccatggaagtcttccacagagaaatcaccatgttaccattggccattgtcctgttcgtcatcatgatcaaggatggcatggaggacttcaagagacaccgctttgataaagcaataaactgctccaacattcgaatttatgaaagaaaagagcagacctatgtgcagaagtgctggaaggatgtgcgcgtgggagacttcatccaaatgaaatgcaatgagattgtcccagcagacatactcctccttttttcctctgaccccaatgggatatgccatctggaaactgccagcttggatggagagacaaacctcaagcaaagatgtgtcgtgaagggcttctcacagcaggaggtacagttcgaaccagagcttttccacaataccatcgtgtgtgagaaacccaacaaccacctcaacaaatttaagggttatatggagcatcctgaccagaccaggactggctttggctgtgagagtcttctgcttcgaggctgcaccatcagaaacaccgagatggctgttggcattgtcatctatgcaggccatgagacgaaagccatgctgaacaacagtggcccccggtacaaacgcagcaagattgagcggcgcatgaatatagacatcttcttctgcattgggatcctcatcctcatgtgccttattggagctgtaggtcacagcatctggaatgggacctttgaagaacaccctcccttcgatgtgccagatgccaatggcagcttccttcccagtgcccttgggggcttctacatgttcctcacaatgatcatcctgctccaggtgctgatccccatctctttgtatgtctccattgagctggtgaagctcgggcaagtgttcttcttgagcaatgaccttgacctgtatgatgaagagaccgatttatccattcaatgtcgagccctcaacatcgcagaggacttgggccagatccagtacatcttctccgataagacggggaccctgacagagaacaagatggtgttccgacgttgcaccatcatgggcagcgagtattctcaccaagaaaatgctaagcgactggagaccccaaaggagctggactcagatggtgaagagtggacccaataccaatgcctgtccttctcggctagatgggcccaggatccagcaactatgagaagccaaaaaggtgctcagcctctgaggaggagccagagtgcccgggtgcccatccagggccactaccggcaaaggtctatggggcaccgtgaaagctcacagcctcctgtggccttcagcagctccatagaaaaagatgtaactccagataaaaacctactgaccaaggttcgagatgctgccctgtggttggagaccttgtcagacagcagacctgccaaggcttccctctccaccacctcctccattgctgatttcttccttgccttaaccatctgcaactctgtcatggtgtccacaaccaccgagcccaggcagagggtcaccatcaaaccctcaagcaaggctctggggacgtccctggagaagattcagcagctcttccagaagttgaagctattgagcctcagccagtcattctcatccactgcaccctctgacacagacctcggggagagcttaggggccaacgtggccaccacagactcggatgagagagatgatgcatctgtgtgcagtggaggtgactccactgatgacggtggctacaggagcagcatgtgggaccagggcgacatcctggagtctgggtcaggcacttccttggaggaggcattggaggccccagccacagacctggccaggcctgagttctgttacgaggctgagagccctgatgaggccgccctggtgcacgctgcccatgcctacagcttcacactagtgtcccggacacctgagcaggtgactgtgcgcctgccccagggcacctgcctcaccttcagcctcctctgcaccctgggctttgactctgtcaggaagagaatgtctgtggttgtgaggcacccactgactggcgagattgttgtctacaccaagggtgctgactcggtcatcatggacctgctggaagacccagcctgcgtacctgacattaatatggaaaagaagctgagaaaaatccgagcccggacccaaaagcatctagacttgtatgcaagagatggcctgcgcacactatgcattgccaagaaggttgtaagcgaagaggacttccggagatgggccagtttccggcgtgaggctgaggcatccctcgacaaccgagatgagcttctcatggaaactgcacagcatctggagaatcaactcaccttacttggagccactgggatcgaagaccggctgcaggaaggagttccagatacgattgccactctgcgggaggctgggatccagctctgggtcctgactggagataagcaggagacagcggtcaacattgcccattcctgcagactgttaaatcagaccgacactgtttataccatcaatacagagaatcaggagacctgtgaatccatcctcaattgtgcattggaagagctaaagcaatttcgtgaactacagaagccagaccgcaagctctttggattccgcttaccttccaagacaccatccatcacctcagaagctgtggttccagaagctggattggtcatcgatgggaagacattgaatgccatcttccagggaaagctagagaagaagtttctggaattgacccagtattgtcggtccgtcctgtgctgccgctccacgccactccagaagagtatgatagtcaagctggtgcgagacaagttgcgcgtcatgaccctttccataggtgatggagcaaatgatgtaagcatgattcaagctgctgatattggaattggaatatctggacaggaaggcatgcaggctgtcatgtccagcgactttgccatcacccgctttaagcatctcaagaagttgctgctcgtgcatggccactggtgttactcgcgcctggccaggatggtggtgtactacctctacaagaacgtgtgctacgtcaacctgctcttctggtatcagttcttctgtggtttctccagctccaccatgattgattactggcagatgatattcttcaatctcttctttacctccttgcctcctcttgtctttggagtccttgacaaagacatctctgcagaaacactcctggcattgcctgagctatacaagagtggccagaactctgagtgctataacctgtcgactttctggatttctatggtggatgcattctaccagagcctcatctgtttctttatcccttacctggcctataagggctctgatatagatgtctttacctttgggacaccaatcaacaccatctccctcaccacaatccttttgcaccaggcaatggaaatgaagacatggaccattttccacggagtcgtgctcctcggcagcttcctgatgtactttctggtatccctcctgtacaatgccacctgcgtcatctgcaacagccccaccaatccctattgggtgatggaaggccagctctcaaaccccactttctacctcgtctgctttctcacaccagttgttgctcttctcccaagatactttttcctgtctctgcaaggaacttgtgggaagtctctaatctcaaaagctcagaaaattgacaaactccccccagacaaaagaaacctggaaatccagagttggagaagcagacagaggcctgcccctgtccccgaagtggctcgaccaactcaccacccagtgtcatctatcacaggacaggacttcagtgccagcaccccaaagagctctaaccctcccaagaggaagcatgtggaagagtcagtactccacgaacagagatgtggcacggagtgcatgagggatgactcatgctcaggggactcctcagctcaactctcatccggggagcacctgctgggacctaacaggataatggcctactcaagaggacagactgatatgtgccggtgctcaaagaggagcagccatcgccgatcccagagttcactgaccatatgaggagctgcagaaatctgtacaaactcaacagaggccacctagtcactggtccacataacccttgaccccttcttcttcatagaggaaacaatgtgccagtcttattcttttcttcaacaaccttgacttccatggaggaagtgctggccccaaggggtctgacacaaagacgggaaacccagtcggcctctagttttctgctgctctcaggcagcacatcttgcaaacagtttggagaaggaggctgtttttgttgaatcgagttctcaaatcggtttagaccaaagccattcttctgaccctctagataagcgtagcctacaacccagtgccgtaagtttccaagattcaagaagtgtatcaacccaggcaatatctcaggatatggaagtttctgggtttatttacccctcagtgcccagagttaaagtttcagaagagacttgtgcacataagggcttcatctcaagtgtattgcagtaatggctgaatcggggttaacatcccttccaggcacagcgagttggttctgctttttgcctgtaagccaaagaaaagccacatctaaaaagctactactaaaagccagaaagaaaagtggatttgaactcagtgtcacagactcttctgagtgttttagggtcacagctagtgtaagaggcatgaagaatagacatgcaaaagggaacgggtgcaccagagacccctgttttggctgacagaccatatgtcccaccagctggggaatctgacaagaggacataggtggcactctttttttaaagctatttattgtatctatttttaaataaaattgcccatcctcattcagctcttagaacaaaagcaaaaaaccctgtaaatcaggagatataagcacatctgcacccagaataggcccatatgatagggcaaccctgagcttaaacaatgacatcttcaagggtagaactaatctgaaaccccattcagcctattccagaatggggataggctgaaacccccttccagcctctggaagacactggcctgcatcagttagagtcagagcaagtgtcacttcacagggaaaagaaggattatatagacttcctatccctagagtttataaatgtcaactatataaaaaaagctcaaaacagtgttaaaggaatgaacagtagaattttaataggctgtccaaagaagccaggtctgctgtgggcaagtatagcctaaccctagtcttgtaaaataagccagaaagggttactgagccaccttaagctagtacctatatagtaggcaaaaagtacagaaatagatgcaataagtgtggtgagtctttgagcctacgagtcatgccaccagccataagttgacctatcacttgagaacctcctcagcaaagatgccagaaaacattcaatcaagttggcaaatgacacagggagctggccctctgaccatcttcctggcaaacctggactggaagggccatttgcagcactgtcctggagctaatacactgtttcactgcctctgccatataatgatgccagcactagccagctggtgggtatttggaggaatcctgcatgaggattgcccaataaggggcaggtacacatacctggcaaagtgatgatgatgtgaattgtttccagtgaggggattgagtcaaaacttggatctcaggtacctcaatttttcccccaatttctggctactactaaaagccagaaagaacagaacagtggcctcaggagatctgagtttgaatccttgctctctaggatgcaggtggcttgaagcagaatgccacacctgcaagttgattagaactgcctttcttcccaggcttgacataggtattaagtcaaaattacatgaaacccagtggtaaaaaagcctctgaaagctgtaacaccctcagtaataacaaaagggatttttatttcacagctaaagggaaaataggtggagaagttaaaaaataatgtctgatcctgttcctaagttccaaactatagccaacactctgatgctgctctttttcttgtaggaccaaccgtcccagtttgcctgggactttctcatttttacagagtcccaaatcctaggaaactggagcaactggtacaactggtcacctactcttgcccctctgtaaatcaagccaactgtgaccatccaatgtgccatcttacagggaaaagttataaccactattcccctataacataatgctaatgattgtacttagtacatttttatacttttatgatattttactgattggaaatgtcatcctttattaaaaataaacatggttttccatagttgcctgccaa

SEQ ID NO: 711 - DNA, 576 bp, Homo sapiens
actataaatagcagccacctctccctggcagacagggacccgcagctcagctacagcacagatcagcaccatgaagcttctcacgggcctggttttctgctccttggtcctgagtgtcagcagccgaagcttcttttcgttccttggcgaggcttttgatggggctcgggacatgtggagagcctactctgacatgagagaagccaattacatcggctcagacaaatacttccatgctcgggggaactatgatgctgccaaaaggggacctgggggtgcctgggctgcagaagtgatcagcaatgccagagagaatatccagagactcacaggccgtggtgcggaggactcgctggccgatcaggctgccaataaatggggcaggagtggcagagaccccaatcacttccgacctgctggcctgcctgagaaatactgagcttcctcttcactctgctctcaggagacctggctatgaggccctcggggcagggatacaaagttagtgaggtctatgtccagagaagctgagatatggcatataataggcatctaataaatgcttaagaggtggaa

SEQ ID NO: 712 - DNA, 1135 bp, Homo sapiens
gctcgtgctccaacgcttctgccaccgccgaccacggccctgcgccccagccaggcctgaggacatgaggcggccggcggcggtgccgctcctgctgctgctgtgttttgggtctcagagggccaaggcagcaacagcctgtggtcgccccaggatgctgaaccgaatggtgggcgggcaggacacgcaggagggcgagtggccctggcaagtcagcatccagcgcaacggaagccacttctgcgggggcagcctcatcgcggagcagtgggtcctgacggctgcgcactgcttccgcaacacctctgagacgtccctgtaccaggtcctgctgggggcaaggcagctagtgcagccgggaccacacgctatgtatgcccgggtgaggcaggtggagagcaaccccctgtaccagggcacggcctccagcgctgacgtggccctggtggagctggaggcaccagtgcccttcaccaattacatcctccccgtgtgcctgcctgacccctcggtgatctttgagacgggcatgaactgctgggtcactggctggggcagccccagtgaggaagacctcctgcccgaaccgcggatcctgcagaaactcgctgtgcccatcatcgacacacccaagtgcaacctgctctacagcaaagacaccgagtttggctaccaacccaaaaccatcaagaatgacatgctgtgcgccggcttcgaggagggcaagaaggatgcctgcaagggcgactcgggcggccccctggtgtgcctcgtgggtcagtcgtggctgcaggcgggggtgatcagctggggtgagggctgtgcccgccagaaccgcccaggtgtctacatccgtgtcaccgcccaccacaactggatccatcggatcatccccaaactgcagttccagccagcgaggttgggcggccagaagtgagacccccggggccaggagccccttgagcagagctctgcacccagcctgcccgcccacaccatcctgctggtcctcccagcgctgctgttgcacctgtgagccccaccagactcatttgtaaatagcgctccttcctcccctctcaaatacccttattttatttatgtttctcccaataaaaacccagcctgtgtgcca

SEQ ID NO: 713 - DNA, 2797 bp, Homo sapiens
gtttgcgtttgaacctcttggcgggtgccggccatggcggcttcgctcccgggacctgggagccggcttttccgcacatatggggctgcggacggcaggagacagcggcggccgggccgggaagccgcgcagtggttcccgccgcaggaccggaggcgtttcttcaacagcagcggcagcagcgacgccagcatcggcgacccctcgcagtccgacgatcctgacgatcccgacgaccccgacttccccggcagcccggtgaggcggcggcggaggcgtcccggcggccgagtgcccaaggaccggcccagcctgaccgtgaccccaaagcgctggaagctgcgagctcgcccaagcctaaccgtgaccccaagacgcctggggctgcgagctcggcccccgcagaagtgcagcacaccctgcggcccgctccgacttccgcccttccccagccgcgactccggccgcctcagcccggacctcagcgtgtgcggccagcccagggacggcgacgagctgggcatcagtgcctccctgttcagctctctggcctcgccctgccccgggtccccaacgccaagggacagtgtcatctcgatcggcacctccgcctgtctggttgcagcctcagccgtcccgagcggcctccacctcccagaagtctccctggaccgagcatctctcccctgctcccaggaggaagcgacaggaggagccaaggacaccaggatggtccaccaaacccgcgccagcctcaggtcagttctctttggccttatgaactcaggaacccctgaggattctgagtttcgggcagatgggaagaatatgagagagtcctgctgtaaaaggaaactggtggtgggaaatggaccagagggtccaggtctgtcaagcacaggcaagaggagggccacaggccaggactcttgtcaagagagagggcttcaagaggccgtccggagagagcatcaggaggccagtgttcccaagggccgcattgtgccaaggggaatagacaggctggagagaactagatcaagccggaagagcaaacatcaggaggcaacggaaacctctctcctccattcccaccgctttaaaaagggccaaaagctgggaaaagattcgttccccacccaggacctgactcctttacagaatgtctgcttttggaccaaaaccagggcttccttcagtttccacaagaagaaaattgtgactgatgtgtcagaggtctgcagcatctataccactgccacttctctctctggatccctcctatcagaatgttcaaaccggcctgtcatgaacagaacaagtggtgctccgtcctcttggcactcctcctctatgtatttgctaagccccttaaacactctaagtatttcaaacaaaaaggcatctgatgctgaaaaggtttatggggaatgcagtcagaagggtcctgtcccctttagccattgccttcccacagaaaaactgcaacgctgtgagaagattggggaaggggtgtttggcgaagtgtttcaaacaattgctgatcacacacccgtagccataaaaatcattgctattgaaggaccagatttagtcaatggatcccatcagaaaacctttgaggaaatcctgccagagatcatcatctccaaagagttgagcctcttatccggtgaagtgtgcaaccgcacagaaggctttatcgggctgaactcagtgcactgtgtccagggatcttaccctcccttgctcctcaaagcctgggatcactataattcaaccaaaggctctgcaaatgaccggcctgatttttttaaagacgaccagctcttcattgtgctggaatttgagtttggagggattgacttagagcaaatgcgaaccaagttgtcttccttggctactgcaaagagcattctacaccagctcacagcctccctcgcagtggcagaggcatcactgcgctttgagcaccgagacttacactgggggaacgtgctcttaaagaaaaccagcctcaaaaaactccactacaccctcaatgggaagagcagcactatccccagctgtgggttgcaagtgagcatcattgactacaccctgtcgcgcttggaacgggatgggattgtggttttctgtgacgtttccatggatgaggacctgtttaccggtgacggtgactaccagtttgacatctacaggctcatgaagaaggagaataacaaccgctggggtgaatatcacccttatagtaatgtgctctggttacattacctgacagacaagatgctgaaacaaatgaccttcaagactaaatgtaacactcctgccatgaagcaaattaagagaaaaatccaggagttccacaggacaatgctgaacttcagctctgccactgacttgctctgccagcacagtctgtttaagtaagctaaatgtatcttactgccccgaaatgagaggagactggtcttgaagcctctggtgctgtttcaacctccatccccacaggagggtggaactcccattctcacaggtttccagtcagcttttcaaacaagaattttgtttccaaatggaaactgaaatatttgttgaaatgtttaaatttgctgataacaaatgttctgaaagaagtaaactagccgggcacagtggcgtgcgcctgtagtcccagctactcgggaggctgaggcaggaggatcgcttgagcccaagagttcatatctagcctggtcaacatagcaagacccctgtctctatttttttaaataaataaactacatgtgaaaacaaa

SEQ ID NO: 714 - DNA, 2237 bp, Homo sapiens
atttggagagttaaaactgtgcctaacagaggtgtcctctgacttttcttctgcaagctccatgttttcacatcttccctttgactgtgtcctgctgctgctgctgctactacttacaaggtcctcagaagtggaatacagagcggaggtcggtcagaatgcctatctgccctgcttctacaccccagccgccccagggaacctcgtgcccgtctgctggggcaaaggagcctgtcctgtgtttgaatgtggcaacgtggtgctcaggactgatgaaagggatgtgaattattggacatccagatactggctaaatggggatttccgcaaaggagatgtgtccctgaccatagagaatgtgactctagcagacagtgggatctactgctgccggatccaaatcccaggcataatgaatgatgaaaaatttaacctgaagttggtcatcaaaccagccaaggtcacccctgcaccgactcggcagagagacttcactgcagcctttccaaggatgcttaccaccaggggacatggcccagcagagacacagacactggggagcctccctgatataaatctaacacaaatatccacattggccaatgagttacgggactctagattggccaatgacttacgggactctggagcaaccatcagaataggcatctacatcggagcagggatctgtgctgggctggctctggctcttatcttcggcgctttaattttcaaatggtattctcatagcaaagagaagatacagaatttaagcctcatctctttggccaacctccctccctcaggattggcaaatgcagtagcagagggaattcgctcagaagaaaacatctataccattgaagagaacgtatatgaagtggaggagcccaatgagtattattgctatgtcagcagcaggcagcaaccctcacaacctttgggttgtcgctttgcaatgccatagatccaaccaccttatttttgagcttggtgttttgtctttttcagaaactatgagctgtgtcacctgactggttttggaggttctgtccactgctatggagcagagttttcccattttcagaagataatgactcacatgggaattgaactgggacctgcactgaacttaaacaggcatgtcattgcctctgtatttaagccaacagagttacccaacccagagactgttaatcatggatgttagagctcaaacgggcttttatatacactaggaattcttgacgtggggtctctggagctccaggaaattcgggcacatcatatgtccatgaaacttcagataaactagggaaaactgggtgctgaggtgaaagcataacttttttggcacagaaagtctaaaggggccactgattttcaaagagatctgtgatccctttttgttttttgtttttgagatggagtcttgctctgttgcccaggctggagtgcaatggcacaatctcggctcactgcaagctccgcctcctgggttcaagcgattctcctgcctcagcctcctgagtggctgggattacaggcatgcaccaccatgcccagctaatttgttgtatttttagtagagacagggtttcaccatgttggccagtgtggtctcaaactcctgacctcatgatttgcctgcctcggcctcccaaagcactgggattacaggcgtgagccaccacatccagccagtgatccttaaaagattaagagatgactggaccaggtctaccttgatcttgaagattcccttggaatgttgagatttaggcttatttgagcactgcctgcccaactgtcagtgccagtgcatagcccttcttttgtctcccttatgaagactgccctgcagggctgagatgtggcaggagctcccagggaaaaacgaagtgcatttgattggtgtgtattggccaagttttgcttgttgtgtgcttgaaagaaaatatctctgaccaacttctgtattcgtggaccaaactgaagctatatttttcacagaagaagaagcagtgacggggacacaaattctgttgcctggtggaaagaaggcaaaggccttcagcaatctatattaccagcgctggatcctttgacagagagtggtccctaaacttaaatttcaagacggtataggcttgatctgtcttgcttattgttgccccctgcgcctagcacaattctgacacacaattggaacttactaaaaatttttttttactgtt

SEQ ID NO: 715 - DNA, 2879 bp, Homo sapiens
atcatttcctcctcagattaccaagcaagaacagctaaaatgaaagccatcattcatcttactcttcttgctctcctttctgtaaacacagccaccaaccaaggcaactcagctgatgctgtaacaaccacagaaactgcgactagtggtcctacagtagctgcagctgataccactgaaactaatttccctgaaactgctagcaccacagcaaatacaccttctttcccaacagctacttcacctgctccccccataattagtacacatagttcctccacaattcctacacctgctccccccataattagtacacatagttcctccacaattcctatacctactgctgcagacagtgagtcaaccacaaatgtaaattcattagctacctctgacataatcaccgcttcatctccaaatgatggattaatcacaatggttccttctgaaacacaaagtaacaatgaaatgtcccccaccacagaagacaatcaatcatcagggcctcccactggcaccgctttattggagaccagcaccctaaacagcacaggtcccagcaatccttgccaagatgatccctgtgcagataattcgttatgtgttaagctgcataatacaagtttttgcctgtgtttagaagggtattactacaactcttctacatgtaagaaaggaaaggtattccctgggaagatttcagtgacagtatcagaaacatttgacccagaagagaaacattccatggcctatcaagacttgcatagtgaaattactagcttgtttaaagatgtatttggcacatctgtttatggacagactgtaattcttactgtaagcacatctctgtcaccaagatctgaaatgcgtgctgatgacaagtttgttaatgtaacaatagtaacaattttggcagaaaccacaagtgacaatgagaagactgtgactgagaaaattaataaagcaattagaagtagctcaagcaactttctaaactatgatttgacccttcggtgtgattattatggctgtaaccagactgcggatgactgcctcaatggtttagcatgcgattgcaaatctgacctgcaaaggcctaacccacagagccctttctgcgttgcttccagtctcaagtgtcctgatgcctgcaacgcacagcacaagcaatgcttaataaagaagagtggtggggcccctgagtgtgcgtgcgtgcccggctaccaggaagatgctaatgggaactgccaaaagtgtgcatttggctacagtggactcgactgtaaggacaaatttcagctgatcctcactattgtgggcaccatcgctggcattgtcattctcagcatgataattgcattgattgtcacagcaagatcaaataacaaaacgaagcatattgaagaagagaacttgattgacgaagactttcaaaatctaaaactgcggtcgacaggcttcaccaatcttggagcagaagggagcgtctttcctaaggtcaggataacggcctccagagacagccagatgcaaaatccctattcaagacacagcagcatgccccgccctgactattagaatcataagaatgtggaacccgccatggcccccaaccaatgtacaagctattatttagagtgtttagaaagactgatggagaagtgagcaccagtaaagatctggcctccggggtttttcttccatctgacatctgccagcctctctgaatggaagttgtgaatgtttgcaacgaatccagctcacttgctaaataagaatctatgacattaaatgtagtagatgctattagcgcttgtcagagaggtggttttcttcaatcagtacaaagtactgagacaatggttagggttgttttcttaattcttttcctggtagggcaacaagaaccatttccaatctagaggaaagctccccagcattgcttgctcctgggcaaacattgctcttgagttaagtgacctaattcccctgggagacatacgcatcaactgtggaggtccgaggggatgagaagggatacccaccatctttcaagggtcacaagctcactctctgacaagtcagaatagggacactgcttctatccctccaatggagagattctggcaacctttgaacagcccagagcttgcaacctagcctcacccaagaagactggaaagagacatatctctcagctttttcaggaggcgtgcctgggaatccaggaactttttgatgctaattagaaggcctggactaaaaatgtccactatggggtgcactctacagtttttgaaatgctaggaggcagaaggggcagagagtaaaaaacatgacctggtagaaggaagagaggcaaaggaaactgggtggggaggatcaattagagaggaggcacctgggatccaccttcttccttaggtcccctcctccatcagcaaaggagcacttctctaatcatgccctcccgaagactggctgggagaaggtttaaaaacaaaaaatccaggagtaagagccttaggtcagtttgaaattggagacaaactgtctggcaaagggtgcgagagggagcttgtgctcaggagtccagccgtccagcctcggggtgtaggtttctgaggtgtgccattggggcctcagccttctctggtgacagaggctcagctgtggccaccaacacacaaccacacacacacaaccacacacacaaatgggggcaaccacatccagtacaagcttttacaaatgttattagtgtccttttttatttctaatgccttgtcctcttaaaagttattttatttgttattattatttgttcttgactgttaattgtgaatggtaatgcaataaagtgcctttgttagatggtg

SEQ ID NO: 716 - DNA, 4181 bp, Homo sapiens
gtcagaagctatatccagctgctggcagagttcctgtcaagggatcaagtcttccaacagaatggttatggtttaactcagcagaatttgttgaacaactacgacatgctggggatcatggcatggaatgcaacttgcaaaaactggctggcagcagaggctgccctggaaaagtactacctttccattttttatgggattgagttcgttgtgggagtccttggaaataccattgttgtttacggctacatcttctctctgaagaactggaacagcagtaatatttatctctttaacctctctgtctctgacttagcttttctgtgcaccctccccatgctgataaggagttatgccaatggaaactggatatatggagacgtgctctgcataagcaaccgatatgtgcttcatgccaacctctataccagcattctctttctcacttttatcagcatagatcgatacttgataattaagtatcctttccgagaacaccttctgcaaaagaaagagtttgctattttaatctccttggccatttgggttttagtaaccttagagttactacccatacttccccttataaatcctgttataactgacaatggcaccacctgtaatgattttgcaagttctggagaccccaactacaacctcatttacagcatgtgtctaacactgttggggttccttattcctctttttgtgatgtgtttcttttattacaagattgctctcttcctaaagcagaggaataggcaggttgctactgctctgccccttgaaaagcctctcaacttggtcatcatggcagtggtaatcttctctgtgctttttacaccctatcacgtcatgcggaatgtgaggatcgcttcacgcctggggagttggaagcagtatcagtgcactcaggtcgtcatcaactccttttacattgtgacacggcctttggcctttctgaacagtgtcatcaaccctgtcttctattttcttttgggagatcacttcagggacatgctgatgaatcaactgagacacaacttcaaatcccttacatcctttagcagatgggctcatgaactcctactttcattcagagaaaagtgaggggcttgtgaaacagattgttctacagatgaatctgtaagccagttacagtttgccttaactcatagacatcaatcagagagtgtcacagatttaaccttgatctaaagacaagttgtacccagagtatgtgaaaagaatgggacgacaagaatgtactggtttcttcctctaagaattgaaaggagttgaactgccttatgtttgggcatgtaactccaaaatactaggtagtataaggctttctcaatcagtgcaaaaatggaagatatataaagcaacaagttgtctgcatttgatcactggtcagattgtaaaaaaaaaaaaaattgttttggcaacattctctatgttattcttattcacatgatcctagaactttatgtgagaactgaatagcagaagatatattattaaatagtttttggaagttgtgctgttaagcaaatgtaaagtcaacagtaacaatgattaagaaaggaatataatgagttcaaagatatctatctgatatattttttatattcatcatgaatcggggtagtcttgtaatttatctaacctttttgttgtatgggtttatagtggaaagaatcttaatttaaataaaaagaacctgaagagataattcaacaaaagtagagaatatgtttgagcttgtcagagaatttaagtatcaaaatactagagagatacaccaaggatatttgaataaaaaaaaaatttgtagaacacaaaatgcctatcaggaaacccaaagcaaaacagaacaaaaagtgaatacatcgttttaaatgatgattttgccatctggtattttattatcataatttgaccaccagtgcatgaaaatatattaaagttcattagccttctgctcttgatttaatagtgaactttaaaatatattaatatcataaaccagcaaataaggagaaataaactgataatactagattcattgggatagttttcccttttggagggaaagtcacaatttttctccatgatcccccattttttgtaaacactggaataatttacaaggataactttattgtagcgagagcaaatcacatctggagtgagccttgttttcatgcaacattaccataagaccattggagtaaatgtttcaaacaaaatgtacttcatgaaattatagaacataaaaatatttatgtgcatattaacctgtattatcccaggagggttaatgaggccccatttcctgcacaaaacaaatgtaggggaaaaaatgggtgctgcattagctttttaaagtcaaacaactatcacataataattccttgatatgcaacataaagtacctatggccacatatctaagttcctttccttgatgtcattagctataaggagtgagtaatgtgaaggacaaaataagcattatgaatacagagacataaaattccactgtcccttccttttctgaaatactctgggaggtattctgatatttttaaatcccccaattttcccagttgatatctctagacttcaagcaactgaaatattataaaaatgcattagtcacaaaagatttattttcttacatcacaccaggctttaagatattttctgccatgccttgcctttagtatcaatattttaaaaatttcactgtaattttataactgcctaataacaaactgaaaacagaacttctgagtttccttatcagaaagggccacagaaaaggccttaagaaagaaagattcacttacttctgcaaacttggcaatccgtaatttaactttaatttgtattttatgcatgaattttacttgtaaagacaaaattaaatttgcttcccctacatcccaactccaagaagtcacaggaatagactctttctaatagtgcagtgaaatattttttcaaaccataaactcacatatatatatatatatatatatatatatatatatatatatgtaccttgtaaacaagaggttaagaaattttatagcacattttaaaattattttcttcctcaaatctatcatgtggtaacttaatctttaacagactttagggccctaaactaaaattataagagctatttcatttgcttgttgtactgggtaattgtaagaatcacaaacaataaatcatgaaaatcctttctgggtttgtggtttctaaaggaaataatattgagcttttgtattttgtcttttaattggctccctggtatcttcagaatgatgtctagattcttcagtctggacccacctactcttctcacattatctcccatcactgttgtcacaaaccataccctatagctaaagattgctactttagtttattacattcagaactttcttcactttgttcacctgttgcccatctttgttctatcatacctgaatggtataataattctaaacaactttcaaggttcatctcatctgtcattctttgttgaagcttgcccttatatcctctcttccccaaacctaaaagtaaaactttctaccactggggcttcagatacttttaatactacttatttgaatttcattatttttattatagtttattattgtcttcatagctgagtactcttaaaattactgtttattataagtgaatgtcttacagaacaaactcaaagtcaatgcttcttttgcatgtgaataatcaagctatttttttgtcatcattactttagtaagtaacattattttatatgaagaatagagtgtatatacataaacccatgtgccagctgccattgcactgcctcacattttcctttagatgtttgagcatagttttaatgactgtttgaaatctctgtctcctagttccaaatatgggtcatcttggagttggtcttcattggtgccttttctcttcagtatgagtcataattttcctgtttctctatatgcctagtaaattagaattttattctagatgatgaataatgtgtggcagagattctggattctgttacattccatcaaagagtattgatattttgtatatacatttacaaatgtacatgtacacaataataaaaataatttttttctcaga

SEQ ID NO: 717 - DNA, 9761 bp, Homo sapiens
agagggaaggtgagagggcaaggagtaaaggtggctgggtgtgggtccgttgaagcgagccgcctccagccctgttgaactggtgggcccagggactggagcgggattgaaagggatcttgctctcccttgaagccttgagttgcagcgatttcagtgtcttctctccctgtgtaagcctgtctcggtgtttaggctgaactacagccaccccctctcccgggggtgtgcaggccagggactggccaggcagccatggctgacgagaagaccttccggatcggcttcattgtgctggggcttttcctgctggccctcggtacgttcctcatgagccatgatcggccccaggtctacggcaccttctatgccatgggcagcgtcatggtgatcgggggcatcatctggagcatgtgccagtgctaccccaagatcaccttcgtccctgctgactctgactttcaaggcatcctctccccaaaggccatgggcctgctggagaatgggcttgctgccgagatgaagagccccagtccccagccgccctatgtaaggctgtgggaggaagccgcctatgaccagagcctgcctgacttcagccacatccagatgaaagtcatgagctacagtgaggaccaccgctccttgctggcccctgagatggggcagccgaagctgggaaccagtgatggaggagaaggtggccctggcgacgttcaggcctggatggaggctgccgtggtcatccacaagggctcagacgagagtgaaggggaaagacgcctaactcagagctggcccggccccctggcctgtccccagggccctgcccccttggcttccttccaagatgacctggacatggactccagtgaaggcagcagccccaatgcatctccacatgacagggaggaagcttgttccccacaacaggaacctcagggctgcaggtgcccgctggaccgcttccaagactttgccctgattgatgccccaacgttggaggatgagccccaagaggggcagcagtgggaaatagccctgcccaacaactggcagcggtacccaaggacaaaggtggaggagaaggaggcttcggacacaggtggggaggaacctgagaaggaagaggaagacctgtactatgggctgccagatggagccggggacctcctcccggacaaggagctgggttttgagcctgacacccaaggctgagatgtttgtgctccgtagcttctagtctggaactgctgctgacccctgtgtgacatcacagggcctcagtttccctatctgcaaaatgggatgatatggaggttcaatgagatggtggcattttgagaatggtaaagaaatacacagggaggggatgatgactattagtggactcttgtttttccaatagttagtggtctttggccaacctttgaaggcaaaatatgatttgttgaggtttgcagcagctgaagccctcaaaagcattttccaccttcccccaaagctgacctctgagaggaaccttccttggtgctccctctgggcccctgatcctttgtgaaggccagtcaggtttcccattcctattgtgtcttatagtccacttggtagatggcgtgatccgtctttacacagagggagcctcatctcctcctgggccacattcctcctgcagctcccatcgctccttggccaggacccaaaaccttctgtgactgacccctgctgacctcattctctctgctcctccagttccaagcctagcccccctgcccatcttgcggctcacactcttgcccaagctgttctcctccaccaggatgcccttggctcccttttcagcttggcaaattcgtgctcacccttcaaacccctacacagatgacctcccttggaaaggttttcctgatgtcgctgcctcctggaaccaggtggtcttgcctctctgcgctgcctttgggacctgtatatttgtcagtgtggcatggctgcctgcctcccgttgaagggcagcatcttgactttactcaccttgagatcgcctgtgcccagatgggcctttggcctggcccagaatcggtggtcatcaagggtgtacagaactcaccaggacccaggaacctgttgcagataaaatcactctcccccacgttcccaacttttagactcacagccctcttacttcccagcattcaaacttctaaatggcctgtatgtattcacaaagcaggcaaaaagcccccagaggaacaccaccccccacccctgcctctggaatacatttgctttgacttggaattgtaggtgaaattcatcttcctggcctacttcagtttgaatcagttggctagccaggtgcggtggctcatgcctgtaatctgagcattttgggaggctaaagtgggtggatcacttgaggccaggagttggagagcagcctgggcaacatagcgaaaccctatctctactaaaactacaaaaattagctgggcgtggtggtgcacacctgtagtctcagctacttgggaggctgagctggaggatagcttaagcacaggagatggaagttgcagtgagccgagatcgcaccactgcactccggcctgggtgacagagtgagaccctgcctcaaaacaaaacaattggaattggatggcatttagtgagcatctactatatgccagatattgagctgtgatctctaggggtaaagagacatgaactactgacaccgtgcttgccttcagagggctcacaatctagtgagcttgatttctgtgagtgcagagcagaagctgaggtgggaacagagaagtaaaaaatggacacaccagaggcagaagagtgacagcctcccagctgtttggggcagttgagtatggtggggaaatagctcaagctgtctttgcagcccctgaagacatcactgtaccctattgaaccatctcagggtgatgctattgttacgctgatccctgcaacgcttgcctgtgccccagcccaggatcctggcagctgcagagaaaatggcagtaacactacctcaaaccaggaccacgccctcagagcctgcaccctgggccacctgggagtcagagaccttcacctgggctatggggttctgggttgaggctggggttcccggcctagggaagggcttccgggttgaggccgggggtcctggcctagggaaggagatgcccctgtgtgctgggttacaaggtcatggccctgggaacacacttccttttctttctgggtcatttctgcctctgcagtgaaggatgccacagggtacaccctctctgctgtcatgactcaggacaggagttcctggtcacagctgagtcttcggatgaggtgaggggtagcatgctcctgtgctctgttgcctaaggcagggcagcctacaacccacgttagaaacagcgtcagcactaagggctaaaataaaactactttcaacatttaaaggggtcatcttcattcacctgcaaattcttttctttaaaaccaccccttccctcggggcaggatacgtgaggccttacgcctgacgggcaccagaggccctcttccggaagtaagccctcactgcagtggcatgaccgtggggtgtgctgtgtggtgctgaatctcaggagtgattccccacacccctgaaccacaaccgcagtggctttagacttaaacaagagcctctggttgctgggcctgccagcaggaagatggtaaccctgttctagagttagcatctgcagggggcttggggtagtggagtgagatggtgagacccaggcttggtctccctggctcttgctgcatgatggggagaccacacacctgatctgcccaggaaggtcccggttgacaccgactgcctctgctaagttattaggaggcccctttcacgctcgaagatacctcatttggatgatacaatgttaccttacctactctgtgacctttgacaagtctggttgcctccgtagccctcagctttctcatgtgcaaatgacagatgaagtgcgcatatcttggaatcttggaagtgatgggggtgtttgatgggacctatcttgtcaatgccctgcagccaaagaccactgggagcacacctcacctgtggttaacaagctgggtttcttcttgcagtaagggggaatgaacaccacagcgaaccagggggagtctctgaaagaggtattagaaaggacttgttactggatttgggccagtgctcagtggcttggcgagggtttaagaagcaggcctttgctctgaaccggctgctgtcaggaggcggggctcattctatgactgggtgtcttcttcaaccttatctaggataaaataaaatcataaaacactgtgcttcatgcccctggccttgccaacttgcagtcccctctaagagcatcagagcctctggggcaccccctctccactgggagaggggcaaggtgctggtgaaggtcctggggagaaggctgggaggctctgaaagggtcaggaggggccttttggggtggcaaagcctgggattctagcgttcagctccaggctccaggtgtgtgtgccagggtgaaaattcctgctcttggtcactctcctgtcaggttggagggactctggaagtttccaccctctggagagggaaaggccctggagggatggcccctgcccttaactggaaagggtgggcaagggaaggcagggggcccaggggcagggaacctgggctctgccgaccgctcgccatgaccttgggtacatcacagccctccctgggctcctctattctctgtaaaattgggtgagggtgggcaagattccacttctgctcccagtccctgagcactgtgtgcctgtcaccatgcaagacaccgtcacccctattaccctatctagtccgtgaaacagccctgggggaccgatctgtcgaccccacattgcaaatgtttgttataaatcccaggctccagaatcagaaagacctggttttaccttcagcctcagccagttccttgctgtgtggccttggacaagtcacagcccctctcagagcctcaatgtccacatttatgcagtggggaggataatacctccctcttgggcttttgtggagaagaactgggtataatgcctcaggcacatttaggtgcttagacagtggtggtcttcttccctctctgggtctcttccctcatctatgcatcagggagccactgtcctgcctataaataaaacaataggtgagtgcattcaccaggaggaagatgcatgtaaaagcttcttgcaaggggtaaagaaagtctgtgtgcccagtgctgagaggcaggtgagccaacagcaagtgcagggactaaggtgtataaaatgcctcctgtggggcaggaggggagcagcatgctgagtgagagaggcagcaccctggaagcttggaggaggagcaggattgcttgtgctgtcagacaggtgtcaaacagggttccaggcagctgctgagtgtcaggtgcttcccataaatcatttcattgaatttaatttttccatctgccctgagagatgggtattaccaggggagaaactgatattcaaacataggtcctctgagcctgtgctcttcccacgatgccacctggtccacgtcataagactcaacaatgcacctgttgtgctgtgcacacttttcttcatttcatcctcgcagcttgcaaggttggtgtattgtccccattttatttttatgtatttatttatttattttgagatggagtgttgcgcttgttgcccaggctagagtgcaatggcgcaatctcagcttgctgcaacctccacctcccgggttcaagtgattctcctgcctcagcctcccaagtagctaggattacaggcgcctgccaccacacccagctaattttgtatttttaatagagatgaggtttcatcatgttggccaggctggtcttgtacccctgacctcagatgatctacccgcctcagcctcccaaagtgctggcattacaggtgtgagtcactgcacccagctgtccccattttatagatgaggaactgaggctcagagaagctgaataatttgcccatccttgcggagaagagctaaatggaggagaggaggtagagctgcagggctttctgttcctgccaggaatcatccagtagccccaggccattctgaccctagtgggacaggagaaaaatcagtatcaataagtcaggcagcaaggttccactgagcatctccctgtgctagtgtggagggagacacccccctgcaacatcttccatgactgcctattgcccacaagataaaattcagattcctcaggctggcatttgaggcccttcatgatctggccccaactgccccatccagctgaatcatctgccatgtgctcccgtgcagcagccccggcatcctcacctttccagccaccctgccttggctcatgctgttccctccacccaggtgcccttcatccccttctctgtcatccctcaaaccctacctgttccctggagcctgaattagccctgctctccccttccacggtggaatccatctccactgcaccctctcctccgaatccctcctaaactgtgtgccccgctctgtccccagcacttctgaatgactagctgtgtgagtaccagtctccccacatggactgggaggtccttcaaggacaggggcctcttccccgccaatacttctatccccaggacttagcaaaagcaaggaacagtagtgctggtggaacagaattgaaccgaaccgggtgcccactctgaaggctcatggcccaggggcatggactcctagcccagggctgaggagcaccagctttggagtaaacagcgctgggtttgagactaggcttccctactggccagctctgtgactttggccaggagacttagcctctctggccctcaatttccttattaataaattgaggttagtgatatcgacccaataggcatgttgtgaagattggatgagatcatgcatattgagtgtagcatgtgcctagcacctggtgagcccccagtaaagtcagttatcattgttagtgttgcctgcagagatgatgttacaatgtgtagacatcaggtgcccatgtgcacctgggtcgttcaagcctacaagcactgtgtcatccaagcacatgtataattcgagctttgtatcgtcagtgcttccaagtgcctgtcaatggacccagctgggctggtggcatcagactctcctgggaaactttaaaaatctagtgtcctagaaccatcctcagaaaagtctgggatggcctgggttttgcataagcaagcctggtgattcttaagtgctgaagggcttagttgtttgtttttcttaaatgagttatcaaacattggatagctggtaggcaacccagaagaggtgggagttgcaagccaggacttaaaacagtagaatgaaggagtgagggtatctcaggcagagggcatggcataggcaaagccttgggggaaggaaggaggaagaaggagactgtcctggctggagtggtggaggacagggtcagagagggaggccgcagcttggccatggggcttcttgaattcctgccacggagctcagatttgttctgatgggcaagggggattaattgatgattcttgagcagaggagtgacatgaaagaaacattcaggtcatatactaacagatacaaaagggaaaggtggcacgtattggtggcaagaaggctggtttgtgccctgcggcagggatttcattctcaacctgccctgtgaaaggttttttccactcatgtcactgggtggatgccaggtcaggactgaagcttgcagagccggtgtcctggattcctccttgctgaccacaaatccagcagagcagggcagggaaccctgtggcagaggctgttgcttcccgccaagacaccagggccctggccaaggcagtgctcagttcacagatgacccaggacaagggcaaatgagggccccagtgactcaggaagtccccaggtcagaaaatgggccccactggtgattctgcagatagtccctgcacatcccggagaagagcagacacggtgtggtgggtaggtggatgagaccaggctttggggatcagatcagcaagcctgggggtaaggagggctagattttatctagtcatgtgttcattcatttgttcacttattcatttattctaaccacaaacactatgcacctgctttgtgccaccccctgtgctaggtactgggggaagagacatgcatctgacccatgcttgtcttgggggaacctctactaccccgggctaactgcagagtgaacagtgacaggtcagtgctgagcagagggaagcacggcggggatctgaccccacctggagagtcggcaggagcttctcagagaggaactcccaccaagctatgtcctgaaggattcgctagggaagagcagggagggagaacagcttgggcgaagcctccagccctgagccaccccaccacgttccaggattgacctggggtaggtgtgaactgagcttagaataggagcggagggtggctggagaagacgtgggtgagtgagtgactggggactggaccagggcgggctgtggttgttgccctggagcacatggaaggccccagtgatggacaaggacaaagctacagtttccatggaaggagggctttgcagtgctgagagctgcccaaagaatgggtaggaacatgtctgaaagaggttacagttcctaacggagagagagagacagatggagagagagagacagagagagagaactagaaatcagacaggaaaagaaagggaattcatccactggaaatatctgtgatcccacaaaagaaacaaatgaaaacatggttaacctcaggggaatgcaaattaaaacaagaagctatgtttcacccataacactggcatcattttgtaaagatgatgtaataaagataataataggtggagctggcagaatgtggaggaacagagctctttctgacgttgctgatgtgaatgggagtggtggcagcttttctgtgagtgccttcacagggggctgccccttgattcagcaattccacatgtaggacttgctcatttattctagttttgttgttgttgttgttgtttgtttgttgttttgagacaaggtcttgccgtattgcttaggctggtctcaaactcctggatcaagtgatcctctggcctcagcctcctgagtagctgggattacaggagcacaccacagtgcctggctttatcctgataatttaccctaaggaagaaatcagacaactgtgctagactatacttacagaaggcagtttatcatagcgttgatgatggtagatgaaatgtggaaagaatctcaatgttcagcaacaggagactggctaagacatcatgccacagctatgcaagggacagatacacggccattcaaaacagtgaccctcctgattgaatcaaatcccctatcaccactctcacagcaccacagatctctctcctttgtagcatttattaccatcataattttacatttctttgtgaatttctttgatgaatttctatctccttcattggacgctaagctctgtgaaggcaaggactctattacgttcattattgtgccctcagtgcttagttaagttcctggaacacagtatcctctcaataaattgttgttaaatga

SEQ ID NO: 718 - DNA, 3135 bp, Homo sapiens
cagaacccaagggcttacctgtgctctgtgattccccaactagggatttagttgtagccacggacctggtaggcaacagggaggggattttaatctgctccttgcatcagaaggtccaataggcagggttagtataatgggagatgccctggtagggctggcaaggagaagaagccacatgtattttggtctgatgaaaagcagcagtgatctgtcactgaccaaaatggtcccccaactatgcattacggagcagcaacccacatacagaactcgagaagccacggcctggagactgtacctggacaccaaagactggagagaggagctggtggggaaaccccagagttcccagggtgccactccccagctccaccagagaactttgggaatgagctgctgcccctgagtgcccctctccagggcctcagtgagggtctctaccctccagggaggaacaaaaccttgccagctggggtcctgcgagagggggcagttcaattcctccacaggggactctgcaactccaatctttcgagtgaagcatctgcgaggccctcagggacccaggatgaactgcatagcagcagaaggaagacaggccagaccaggcgggagggagcccggaaacatctggtttgtagtttcagactctacccgttcacagttcacacagtctcaccgggaaactcacaccttgccctgtaccaagtttttaaggcagttaagctctgcccatccgagacttcatttttcttgagtagaaaatcactgaaatcatcagatccatggcacccaccttcactttctcctaacagctggaaccgtcaggctggcttcagggcctggtcttcgcacttgatatcactatccctcacctgctcagacagccagagcaggcgggtgagttcctcccaacaacctccactgcattctctcagctcccaccgcagggcagcccacgtgcctgagtgaacatgtgtgcgtgtgcacacacgcaagtatgcacagacatacactaaacacgaacatacagtgcacatgaacgctgctcccagctagggccctctggtcagactgctgcctgggttagaattcttgtccccacccccacttactatagttctgtgatcctggacaagtaactgaatctctccgtgccacagtttcttcttgtagaaaacgggaaagttcacagtacttacctccttagagtcattgtgaaggtcagtttgaggcatcacaaatttaaggcacccagacataagggtcaacagggttagctatcactgtccagtttggtgggaggaactgaatgcatgtaggcacatggacccagtctacactcaggcacaaaaggagctacattagttacattcaggcataccccagagcactacaattctctgagacattgtctggaaatctagaaatcatctccttgccctttaaggtattttaaccctcgcattcctctgcttttccaagaatgtgaatcttgccaagctgtccgtgagagacacgggctcccctcgagggagacttgcaaatgctccataaacagccacagtgtggggctctgccatgaggaagtcacagcagacacgctagacagcatagtcctggatgcaacctggaggaagggaggcccatggtggagcactcactccgtgcctgtctgcccggtgagacctcaagttccttgcagacaaaggccatgggttgttggctcttgtgttcccggtggcctttccagagctgaacagaggacagatgcacagacgggggggctctggtggtcaaggcagcagtccccttggatactaaagtctgagccaggcccctcaggcccggcatgggcagtgcgaggcccatagtggtgggaagccagttggccagctggggtgagaaggccgcgaagccatgggcagacaggaagtggaggtgaatgtctctgcctcctgtaggcctcagcagggacagcacagaccctctggctggggcagcgcagaccctctagctggggcagaacaaggctggtgcttccttctagtccttgagactttgtagctctaactcaagcagaaccctggggttttgggattctgtgtggtgactgctgaggaaggtttatggatttgacagggtgcatgtcacagagagacagttctcagtcagcacttcctgtcccctgcagaggctcataggggacagcccctgccaaggagaccctggaggggctctgaggatagcaatcagaggttgggctggctggactgagcccaggcctgttgcccaccaagtctccataggttctagtctgacccctctctccacccctgggctatgcaggccagcccgtgcagaccacccccgacgcgtccacttgcaacacccgcctcactgtgccaacactccatccacacaggaaaggactgagaacgtgatgcttaacccaaaggagtgagtttcataggatgggtggctttaacagtttcacagcaggacactgagggaatatttccctatcccttcaaatggacggtcactacagaaacgtgtagagcaagactttgtcaaggggctgtttccaggtctcccggtgtctaaatagcagagctggaatgggaactgagaaccgattctttccacaaccgcccactgagcagcaaggctgcagccagcaaagaggtgcggaggcaagcaagctccatgtggtggggacagcgcattgcgacctccaccacccctgcagtgggctgccagctgagccacctgtcttccactgtatctactgtacgaacttctccagctctgctctgttttctcttcctcagcatccaccccgtgacacgtagtggtggctgatgtcgccacagtaccatgaggttaacaggtcctccctccagcttccctcatggtggcagcctaacctgcattgcagccgttcaccggacaccgcaccagaccctcaaaacccatccaagactgtgggaggagtaaacaacccagcccagttaagaggagatgccgaatttaatgaaccctatttgaattgcagggctgtgattcctcttacctttaacgtgaactcacaggcggattaaagtgaaataaaacctaccatttgagtta

SEQ ID NO: 719 - DNA, 2066 bp, Homo sapiens
agagggcactgggaagtcacagctgctgagggaccactctgctcccccgcctaagccatgcacctctgtgggggcaatgggctgctgacccagacagaccccaaggagcaacaaaggcagctgaagaagcagaagaaccgggcagccgcccagcgaagccggcagaagcacacagacaaggcagacgccctgcaccagcagcacgagtctctggaaaaagacaacctcgccctgcggaaggagatccagtccctgcaggccgagctggcgtggtggagccggaccctgcacgtgcatgagcgcctgtgccccatggattgtgcctcctgctcagctccagggctcctgggctgctgggaccaggctgaggggctcctgggccctggcccacagggacaacatggctgccgggagcagctggagctgttccagaccccgggttcctgttacccagctcagccgctctctccaggtccacagcctcatgattctcccagcctcctccagtgccccctgccctcactgtcccttggccccgctgtggttgctgaacctcctgtccagctgtcccccagccctctcctgtttgcctcgcacactggttccagcctgcaggggtcttcctctaagctcagtgccctccagcccagcctcacggcccaaactgcccctccacagcccctcgagctggagcatcccaccagagggaagctggggtcctctcccgacaacccttcctctgccctggggcttgcacgtctgcagagcagggagcacaaacctgctctctcagcagccacttggcaagggctggttgtggatcccagccctcaccctctcctggcctttcctctgctctcctctgctcaagtccacttctaacctggtcttcggagctgggttggccccttctttgggctcaggaagcagccttagcacacgggcctctcctccctcactactgggtgctgccctgcgtggctgaccagctggcccaggatttcacagtcgaaaaggaagccaccactgatgcctcccactgtgacaggccctgtcaccaccaatatcttatttcaacctcacagttgacctgagaaatcgagattatcactccactttttcagacaaggaaactgaggctcagggaagccaagtgacaagtccaaggtcacgaagactttcttggagcccgaaacaccaccctctgctcctccttctcctgtcctggcccaggcatcctaggggctgaaatcctggaaaccgtgggctggtgtgagaaggtttgcatgctcagagcagagaagggctctccccactgcttcgtgattccagggccagagccatgcagtcccagaaaccccaacctagctggggcaggtccagagtccaagccctggtgggtagaggccaagcagaagccctgaagtggactcttgcttcccctagtagtgttttcagtgccaagaagctgaaactgtgagctggagttggggagaggtctggaagaggaccatctgggatttctacagcctgggtacccatagccacaccaaggcttctgggagattctgcagggtcagctttccaggctgttcccaaatagctccctgcctccccactgcccctaaagccacagcagaagagccattcatctcataaacaaaaaggaagaggaaagaatgaggaaggaccctgtgcaaggttatttgcaggcagggatgggcttgtacctgacagcacccacccctgtgtggcccccaggccctcatcaccctcagacccctcctaagcagttccctcattgctctttggactaggctgacagcaggaagagcagggcccatgaccgggtggaagttcagttttggtgtctgcttcaagagggggttttacactctgattccaggacaagcactctgaggcgggtgggggagagaaaccctggctcttcacccaggtttcacacacatgtaaatgaaacactatgttagtatctaacacactcctggatacagaacacaagtcttggcacatatgtgatggaaataaagtgttttgcaatcttt

SEQ ID NO: 720 - DNA, 2503 bp, Homo sapiens
agtgtgtgaagtaaagggattaaaggctagtctcaggctggggatggctcctgtctatttcttctctctcagagactgcagatggcttttccctgccgcaggtccctgactgccaagactctggcctgcctcctggtgggcgtgagtttcttagcactgcagcagtggttcctccaggcgccaaggtccccgcgggaggagaggtccccgcaggaggagacgccagagggtcccaccgacgctcccgcggctgacgagccgccctcggagctcgtccccgggcccccgtgcgtggcgaacgcctcggcgaacgccacggccgacttcgagcagctgcccgcgcgcatccaggacttcctgcggtaccgccactgccgccacttcccgctgctttgggacgcaccggccaagtgcgccggcggccgaggcgtgttcctgctcctggcggtgaagtcggcgcctgagcactacgagcgacgcgagctcatccggcgcacgtgggggcaagagcgcagctacggcgggcggccagtgcgccgcctctttctattgggcaccccgggccccgaggacgaggcgcgcgcggagcggctggcggagctggtggcgctggaggcgcgcgagcacggcgacgtgctgcagtgggccttcgcggacaccttcctcaacctcacgctcaagcacctgcacttgctcgactggctggctgcacgctgcccgcacgcgcgctttctgctcagcggcgacgacgacgtgttcgtgcacaccgccaacgtagtccgcttcctgcaggcgcagccacccggccgccacctgttctccggccagctcatggagggctccgtgcccatccgcgacagctggagcaagtacttcgtgccgccgcagctcttccccgggtccgcttacccggtgtactgcagcggcggcggcttcctcctgtccggccccacggcccgggccctgcgcgcggccgcccgccacaccccgctcttccccatcgacgacgcctacatgggcatgtgtctggagcgcgccggcctggcgcccagcggccacgagggcatccgacccttcggcgtgcagctgcctggcgcacagcagtcctccttcgacccctgcatgtaccgcgagttgctgctagtgcaccgcttcgcgccctacgagatgctgctcatgtggaaggcgctgcacagccccgcgctcagctgtgaccggggacaccgggtctcctgaggccagttgggcggcttcagccccgggcctccaaccatgtccatgctgagaaggcagctttcccgctctgggtaccttacgtcctgcccagctctgtgcacctgaaccccagctgcgcactgaaatcagctggggtggggggtgtggaaaatgcctacatcctggctccatctcccgaagtttcgatttgattagtctggggtggacccagacatgttaagtattttttaagttcctccagtgatgcgaatgtgcagctaggcctgaggaccactcggctagactatctcttcatcctcgcaaagccagctccaccgccctctctgcaagaattccgggcccctcgctcccacactcgggtcctcttgagcagtggagcaagggagacctgggagcgtgggagccaggatcagcgccccctgccatgtgcctacaaatgtcagttgtgatttccactgtttacaagtgagtggagctggagctgggctgacagtatcaggtggatcccgcttccccctcccccaagaagtcagccaacacgcagctgaggcgcatgtggtggccttcttcccaccactaccccagtacaccgtgaggtagaaatcttcaccgtgcaaagtggaaaccagaggcccggtcagacagtgactaatccagggccgtggcattcccagacagcacaccactgtggtcccctccacactcaccccaaccaaagctaatggcctagttgggtcctgcccgccaataatcacccccacgggtcagagacaggctccttgccggggtctgggcctcaggctcagtgggccttggacaacccagcagggagttccggggagtccgaagtggagaaaggctggtgggaacatggaggccagtgttggggagcctgtggaggcaggtgtgtagaattgtgttcgggaggtgggggatctgagaccgaagtggacagtggttaagattgtggggccgggcgaggtggctcacgcctgtaatcccagcactttgggaggctgaggaggtcggatcatgaggtcaagagttcgagaccagcctggccaatatggtgaaaccccgtctctattgggagtacaaaaattagccggccatagtggctcgtgcctgtaatctcagctatttgggaggctgaggcaggagaatcacttgaacctgggaggcggaggttgcagtgagccgagatcgtgccactgcactccagcctgggcgacagagcaagactgcatctcaaaaaaaaaaaaaaaaa

SEQ ID NO: 721 - DNA, 4086 bp, Homo sapiens
agccatcctgtcctgtcctccatcctggccaaatccgaaagggaaaatgaaagagggagcaggaggcgccggtcccagccacctcccaaggtccctggctcagctctgacaccccagtcccggccccagggtgagtggggttgggtggcggtttaggggcaccaggggcgtgtggggacctgtgtaagtgtggggtggggaggatctcaggagatgtggaggctggaggcacaggaggccagggaggagggagaagcctggcgtcgcactcccaccacgctggggtaggagggcagggacacctccgacaaaggaccctgtgagagttatgaaagcggagttgcctctgtaccagccccccaccctgagaggagttcactgcagtaaaaatggtgagagaaatggtgggccaagaaaggagtggtctcgctgcctctgccactcccactcctcccatgggcaccaaattgggtctagcgtctcgggttcgaggctccactcttcccacagcatccttgacagctaagggcaccgctgggtttccgcttccgaaaccaggcaagtcaggggctggtccagctgatctccaaggtccttcctaagaatctgggatctggaggatcccagggtcgaacggagacggctcagggggtgcggctaaaatgcaaatgggggatcctccccagcacccatcggtcccaaagagaaggtaacccatagctgagcgtcgcctgctcccctcgggccctcccgtggccctccgtttcatactggtctcatcgctaaacccgggcctctcctacctcacgactcaccctgaagtcagagaaggtccaacggaccccaccccgataggcttggaaggggcaggggtccctgacttgccccatcccctgactccccgccccgcgtccccagcgccatgggggagtgggcgttcctgggctcgctgctggacgccgtgcagctgcagtcgccgctcgtgggccgcctctggctggtggtcatgctgatcttccgcatcctggtgctggccacggtgggcggcgccgtgttcgaggacgagcaagaggagttcgtgtgcaacacgctgcagccgggctgtcgccagacctgctacgaccgcgccttcccggtctcccactaccgcttctggctcttccacatcctgctgctctcggcgcccccggtgctgttcgtcgtctactccatgcaccgggcaggcaaggaggcgggcggcgctgaggcggcggcgcagtgcgcccccggactgcccgaggcccagtgcgcgccgtgcgccctgcgcgcccgccgcgcgcgccgctgctacctgctgagcgtggcgctgcgcctgctggccgagctgaccttcctgggcggccaggcgctgctctacggcttccgcgtggccccgcacttcgcgtgcgccggtccgccctgcccgcacacggtcgactgcttcgtgagccggcccaccgagaagaccgtcttcgtgctcttctatttcgcggtggggctgctgtcggcgctgctcagcgtagccgagctgggccacctgctctggaagggccgcccgcgcgccggggagcgtgacaaccgctgcaaccgtgcacacgaagaggcgcagaagctgctcccgccgccgccgccgccacctccgccaccggccctgccctcccggcgccccggccccgagccgtgcgccccgccggcctatgcgcacccggcgccggccagcctccgcgagtgcggcagcggccgcggcaaggcgtcaccggccaccggccgccgagatctggccatctaggggcgggcaccgcctcgcgcggactggacggcgagggccggaccccgccacctccgcccgcaccgcagaagccggaagctgcttccaccagagctgtcgcgggacctgccccggcaggagacgcgttgtggggacggcccgcgggcggcatcgcacttgcctcgtactgcctcccagtggctgccggcggcacctggggcaggccgggctgggggcggagaatgaactcaggcaggtcctggatgccaccacccaggtggaaaggaaggagaccaggaccctgagagagagtggacccgagggggagaacagagcggaaggtggagagtggttgttttactggggacaaaaacaactgtgatgccagcattctcaggcactctctgtgttcagagagagagtggtccccctgtgggctctctgcgagtgtgcatacacggacacataagcactgtgagctgtgtgcacgcgcacctgtacaccctgtgtgagcgctgtgcatgtgcgcgcatgtgtacaccctgcgtgaggcccacttgtgcacacagacacacgtaaccctcccgggtgagctgtgtgcacatgcacacagaaacatatgccccttgagagctgtgtactcacatccctgtgagctttgtgtgagtgcattgtgcacacacgcacatgtccattctgtgtgggctgcgtgtgcacacctgtacacagaaacatccttgtgcgctatgtgtgcatgtgtacatccggcgtgacctctgtgtgtgcacgcgtgtgtgtgtgatctctgatatgcactgcgggggtggccaggatccgatgccagctgcagccacaatggctccctccctaccaccctaacccagcccacctgccagggcatcacaggaggtctgtccccccctcccaagagaccccgcccagggagggaagaggaggagaggctccctttccccgggcaggcctcaatcctcgggagcctatgagcaacatcctcacagtaccccttgtggcgaggcgggggctgggcgctttcatggaggtggggtgggggtgggcggcgggccagagggcaacccagacgtgtgttatgcctccctcctccatcttcatcctccccgccgctactgctcccccaggctataaacgggaaagtcccttctgtcctcaggagaaagctcccaaaacacacgcgctcccggccctgccttcccttccaaccacccccttcttcctacttgcgggcattcgaagagctgctgcctatgcagcgcatccccctcctgtgtctcccctcccgtctgccctcccccttcaccagccagtgggctgctctccataagatcacccaggacctaagcgagaaatccaggggccgtcatcggactgcaccttgcgggcctcaccgcatcctgcctaccaggctgtgcgttccccgccatcaccccaccctgtccttctgagttcctggcgtctttctcagctctcctgtgccccacacagcagtgggaggtgtttctgaatagcgccccccacttaaacccgggactgagggcagcacccctgccctcagggtgagtcaagcgccttcacaaagcttccttctgaagccctgcccctgtcaggccttcgactccacagcaccggcttccaggtgtgctcagaaccatagggaattttctcttctaacaagcaccagacctgcttgctgccaagcgtttgaacgtgctgttcctttgcccagagtagccgctgcttcctgcagccttctcctcccctagctaatgcccacccacctattgttgtcacttgggaagaaaacagacaccttcaaggagagggctcccctggtagcccccaccccaagacagagctggatgcccctcgcttccgtagggaaagcacttctcctgcaggatggcattgctctctccccttccatggcacgtagtatgtgctcagtaaatatgtgttggatgagaaactgaaggtgtccccaggcctacaccactgccatgcccgaacactatccatgctatggtgggcaccatctctctgatgacagttctgtgtccacaacccagacccctccacacaaacccagatggggctgtgccgctgttttccagatgtattcattcaacaaatatttgtagggtacctactgtgtgtcagaagatgttcaagatcagcatcatccgatggaaatagcatatgagccatgtatgtagtttcaagtttttcattagccacattaaaaaagtaaaaggaaacaaatgaaa

SEQ ID NO: 722 - DNA, 2365 bp, Homo sapiens
agatcgcgaccctgggagtggagtgggggcagcgtggttatgtggctggaccgccgcggatggctcagggttcttggacattggcgctacgaccttaggcgccctagctttaccaggacttggagtggcgataagggcccaatggcagaaacagtgtctacccaggttgggacagagggcgggctgagggcttcgcatcagcaaaacggtgacgctggtggcgacgcgaaggttgagctgtcccccgggcccccgaagccggctggccgggaagtggagccggccccagtaggcggggagcatccctcggctgcagccccaggcccgggcaagcataagaagcggcggggcgcaaccagggagcgtgtcgtgccgcccccgaagaagcggcggaccggggtgagcttcggagatgagcactttgcagaaaccagttattacttcgagggcggcctgcgtaaggtgcggccctattactttgacttccggacctactgcaaaggtcgctgggtgggccacagcttgctgcacgtcttcagtaccgagttccgagctcagcccctggcctactatgaggccgcggtccgggcgggccgcctgcaactcaacgagaagccggtgcaggacctcaacatcgtgctcaaggacaatgatttcttgcggaacacagtgcacaggcatgagccaccagtcacagcagagcccattcgcctgctagctgagaacgaagatgtggtggttgtagacaagccttcctccattcccgttcacccctgtggccgcttccgacacaacacagttatcttcatcctaggcaaggagcaccaactcaaggagctacaccccttgcatcggcttgaccgccttacctcaggggtgcttatgtttgccaagacagctgcagtctctgagagaattcacgagcaggttcgggaccggcagctggagaaggagtacgtgtgccgggtggaaggggagttccccactgaggaagtgacctgtaaagaacccatcttagtggtgtcttacaaagtaggggtgtgccgtgtagatccccggggcaagccctgtgagacagtgttccagaggctaagctacaatggccagtccagtgtggtacggtgccggccactcacaggccgcacacaccagattcgagtccaccttcagttcttgggccatcccattctcaacgaccccatctacaactcagttgcctggggtccttctcgaggccggggcggctacattcccaagacaaacgaggagttgctacgggacctggtagcagagcaccaggccaaacagagcctggatgtgctagatctctgtgagggtgacctgtccccaggactcacagactctacggccccctcctcagagttgggcaaggacgacctggaagagttggctgcagctgcccagaagatggaggaagtagctgaggcagcccctcaggagttggacacaatagccttggcatcagagaaggcagttgaaacagatgtcatgaatcaagagacagacccactctgtgcagagtgccggctggtgcgacaggatcccttgccccaagaccttgtgatgttcctacatgccctacgctataaagggccaggctttgagtacttttcaccaatgcctgcctgggcacaggatgactggcaaaaggactgagggtgtggccaatggagggattgcttcttgggttgtgacaaggatgggctatagggcaagggctgaccccatgggctagtacttggggtttctataggaatgaggacgggcttctaaagagacctgctcatacttgctacctccttccagtgggaatttggagactttttggtttgtaaatatatccctttttctaacatctttgatgtctggttttcttccggcttcttttttattactgatgtaaaattcacataacataaaattaaccactttaactagccaggcacagtggctcatggctataatcctagtactttgggaggtagaagtgaaaggatcactggaggccaagagttcaaggttaaagtgaactgtgattgtgctgctgcactccagagcctaggtgacagagtgagaccctgtctcttaaaaaaaaaaaaaattaaccaatttaagatgtacagcgtagtcacatttagtacattcacagtgttgtacaaccataacctcatatatttccaaaacattttcatcaccccaaaaggaaacctgtacccattaagtaagtggtcactttccactccccttccaccagcctctggcaaccactaatctactttctgtctgtttggatttgcctgtttattctggacattttatataaatggaatgataaaacatgtga

SEQ ID NO: 723 - DNA, 2197 bp, Homo sapiens
gcttcgacttccgggtgagaccgtgaaggtgtggcgcgacgttggagaccggggcagcgccatgtaccacagtggatggaaggatgcgcggtgcggcggggcagctgtcctcttctccccggacccagcgcctggagagccagccctgcagggtgggctgggcgagccaaactgcgttcctggtgcagggcttcgggtctccctaacagaccttatacgctgaccggcggccgccatggcagtgtctctttgctcagacatccagggacgaccacattcgtccaacagcggtcgctccaccaatcctgggagaagcgaatcgttttctccgcgtgccctgtcagccgctcatggtgcccagagaggaattttagtggcagcattccggctgtcacgccaccgaaattgccaggccactccaagtcagaaggaccaccaggaaaagtcaggaagagaaccaccatcaggtcccagcctctttttgtgacaaggactagagggtttgggtctgcagtgggctggctcccgctgggctcacctgtcctatagagcaggctgcctcaaggaagaagctcacaggggacatctgacatctgaaacagcaagtgtaaaatgctttaaataagccaaaactaaaccaatcgttatgttaactaaaaatacatgaatgctaccgaagatagtcgaatattagaggaagagattaaactctgattttgagcactttgtgctttattcggaaaatgaataagatgcagttctgaaaacctgaaaatataaagaataggatatgatacgcacactagatgaaaacaaaactttcagaccatattttcttatttaaagctctaataagtgagatagcagagtaaactattcactcaaataattagtaactgatataagggtatgtatcaataacaggtattaagacaaaaactttatgagcttttccattttaacaagggatgatgattctagacttctgccacaacattatggtcgacaaaacattcttaattcattttacatagatctgactctagattctgaaacagcaagtcataatcttgtatctctaaagatagaatacagtgcgatttggaaagacaccacaaaaactcatgatccaaaaaagattaaggctgttattaccaggaggaagagaaagaggacaaaatcaaactggatagatataatagagttgtttgttagaattgtcttcccaggagatggaaaaagacgccatcacaataggattcatgctttagttttcagctatagaaatgtaataactttgccaaagtaattacactacatagagtggcaatcgttctattaaaagtaagacccagtaatgttaggatttgttctggacaatgaaggggatgaggtttaatcttatgacttgaatgccaggtctgaaatcttttcttcaagtgatatttttatgaaactacttaggctgtgtttcacactgggtatgatttctaacctcttataacctgtacagtaatagattatgaaggatgaattatttgaaagctattttgtattatttaggagaggagctcttcaattctgaattgtctgccacttacaagcagaagaaagtttttttctttcattattttagcaactatcaataaaacagtattagaaatgcctactcttcagagatgtaatgggaataaattgtaaagtacttttgatattctaagatgaaagatggtattacacagtcaataattcaatgcttcccacattatgaattttatcaaaattatgtagagagctattagttcattccagcaacaaaacaggcttatataaaaacaaaaacctcctgggtcatgccatcctacaccaaattcctgttaaacagaggcatgatttattccagtgaccttgctatttcttcataactgtaatatgtctaatgttagacattttaaattaacattctattagataaactgagaatttaggtctctcgcaccacccaggcacatactctatctttccccacaaatatccaaatatggtaatataattggattaatacgttcatatgactatataattgttcacagctgagccacttaggtgctataattataatttctttgatacacaaattttgttttattgtgattaaaattgcctgatttcttacttgctgcaaaaaaaaaaaaaa

SEQ ID NO: 724 - DNA, 1214 bp, Homo sapiens
acagtaaaagcaaaagcaacagctcaagcagcctccttggagaaaacctgaaaattcaacttgttcaagagaaggtcttgtacgtgcctaagttctagagcctcctgacgtgagcatggctgagagtgaggaccgctccctgaggatcgttctggtagggaaaactggaagtgggaaaagtgcaacagcgaacaccatccttggagaggaaatctttgattctagaattgctgcccaagctgttaccaagaactgtcaaaaagcatcccgggaatggcaggggagagaccttcttgttgtagacactccagggctctttgacaccaaggagagcctggacaccacctgcaaggaaatcagccgctgcatcatctcctcctgcccagggccccatgctattgtcctagttctgctgctgggccgctacacagaggaggagcagaaaaccgttgcattgatcaaggctgtctttgggaagtcagccatgaagcacatggtcatcttgttcactcgcaaagaagagttggagggccagagcttccatgacttcatagcagatgcggatgtgggcctaaaaagcatcgtcaaggagtgcgggaaccgctgctgtgcctttagcaacagcaagaaaaccagtaaggcagagaaggaaagtcaagtgcaggagttggtggagctgatagagaaaatggtgcagtgcaacgaaggggcttacttttctgatgacatatacaaggacacagaggaaaggctgaaacaacgggaagaggttttgaggaaaatctacactgaccaattaaatgaagaaattaaactagtagaagaggataagcataaatcagaggaagaaaaggagaaagaaattaaattactaaaattaaaatatgatgaaaaaataaaaaatataagggaagaagctgagagaaatatatttaaagatgtttttaataggatttggaagatgctttcagaaatatggcataggtttttgtcgaaatgtaagttttattcttcctaatttactgtgatttgttaatggatgaattgtattttgcaaagatagttagagaaatacctccttccccttagctttattaaggtatcattgataaataaaaataaaatatgtttaatgtatataatgtgatttttaaatatatatatatatatacacacattgtgaaataatgaaataaaggtaattaacacatcta

SEQ ID NO: 725 - DNA, 3503 bp, Homo sapiens
gagaacacaaaggaaacttggacaagtagaaagtggatgacccaggctccgttacatatacttggattccagctgggacctagatttgctgaggacggaagccaaggagacaggaacatgtggctgctcccagctctactccttctctgcctctcaggctgtttgtctctgaagggccccggctctgtgactggcactgcgggggactctctgacagtgtggtgtcagtatgagagcatgtacaagggatataacaagtactggtgccgaggacagtacgacacgtcatgtgagagcattgtggagaccaagggagaagagaaggtggagaggaatggccgcgtgtccatcagagaccacccggaggctctcgccttcactgtgaccatgcagaacctcaatgaagatgatgctggatcttactggtgcaaaattcagacagtgtgggtcctggattcatggtcacgcgatccctcggacctggttagggtgtatgtttccccagcaattacaaccccaaggaggaccacacatccagccacacctcccatcttcctggtggtgaaccctgggcgaaacctcagcaccggggaggtgttgacccaaaattcagggttccggctcagcagccctcacttcctgctcgtggtccttctgaagctgcccctgctcctgagcatgctgggtgctgtcttctgggtgaacaggcctcagtgggctcctcctggaagatagagccaggctgacccgaagccctgcagagccccatccccaggagtgccccgtgcagggagtcaacctttcagactggatgcgagagacctgtggactctggagggatttattgttcctgtgcctcaaaggagggtcctggctcttagaggacactcctctggagtcctcaatgtgcagcttgggggtcctcctttctcctccccagtcccctgcctccctgccctcatgcccacttcccaagggcaagaattccctggaagttggccgggcaccatagcgagtgcctataatcccagctcaggaggctgaggcaggaggatcggctgaacgtaagagttccaggccagcctgggcaacatagagagccctgtctcagagagagagagagagagagagagagagagacagagagagagagagagagagagcgagagagagagagagagagagaaaaggacggaggaagggagggaaaaaattttctggaggagcctggcccttcattcttcttggcacaaatgcttctcaggccagtttcccccagggcaataactacctccttcctgcagacaggagtctccctgaggacacacccctcacagccccagcctttaggctcacagagctccatctcttctctgggacaaccccaagggagcttggtcccggcagagcttgctcatgcagttgcccagtgtcccacatgctcagggctcctctcgtcttctgacgccccttgggtctccctggctttaaggccccttctctccctgtaaccaggcagtgtgtggctgggctcagaacatctctgcctgggtgggccgtggatgagctgctccaggttaaagttctggggcgagttgaaacagtaaagggagaaggagctggtgggtgcccctgatatcactcctggaattcccccacctggaggtgtccaatgcacaaggtcaacagagtcagttctgtccactttagaagtctggctgagaccacctgttagcaattaaccttttccacaggcagagcagatatcgtttttcaaagacaggatggagggcacagaggtgaaggatacttgtccacacttgaagtgcacagtgctatcaccactactggtgacccctggctcgggaatgagctcagttggttttctgaatgtttgtcaattactctgtttccctaaagtttgtggggaggactcccacagtctgccacaagcaagcatcaccatctccacttgctacctacatctggaccagtgctccccctctgcccccaggcctgagctcatcctgagctagtgatgccagtgtccagagcacatggagtgaccctctgagtgccgagtgcttaggcagagctgccgtgctctgaacttgagctctggtggggctcccagctccatcatgcatggtgactaggggaaagatggggctggcccaggactcatgctgaaagagaaattcaatctaacaaggcccatattaattatattaacccgggaaatatgatgatgagcaagaaaggagcttatgattcattttatgagaaggataagctcccaagtcattacagcataggaagaactctagagccacaagagatgcttcctgatgtcagggggttggtgaggagaatatcatgccaagctggccaggtcagggaaagaaggtgacattcatgttgatgttgaaggaggtataggatttcagcggagcagggatggagcaacagggagagagagaggacagagaaacagcataagtgaaagcagagaggcgggaaataatcttcataacaatagtcacttatagaagacctatcagcaaatggactgtactgttcacatacagatgctcatggtaggatgtgtctaagattccaatggagtgaaattttcctgtggcaggccagatggaactaatctagaagaactcaggtggtggcaggttcaggaggcttaggactcaactcttacttaaactttgattagctatggtgggatggatttgagcagaacaagatgggattgcagatgtgctttaggaggacttgcctagcagatgtagcaaagtctgaaaggaagaatctgggagtccggagtcttaagcctggaaaaccagaggaatcgggcatcattgacagaagtaggaaagtcaagagcaggcttggatgatgcagagcttagttttctgtgtgtttggaatcatcaggcagagaggtctagcagatagctagagatgtgggttagcagagtgttgagggctggagaggaatgtgtgtagagagattaactggaacccagcaagaagtgaaaacatggagggaagagttcagaaccaaggacagagccctcggggcacctgcatttaaagacaaagggtaggaggaagacattgatcaaggtgctggagcagaatcaaacaggtggaagatgagaagtcaagagccatgaatgtttcaaggaggagagcagagctagagaggtggaggaggaccgggattgagaggaggctattgaacttatcattcacaaggtcactaatgaagttcagaagagcagatcaacagagcaatgacagcagaagccagaagagaagagttaagaaagagtagacagatggcagacagcaggtgcaggagaaacaaacagtggcttctccatgctttgaattttcccttctcccttactccctttttttcccctattcttcctttcttttttccctttatttactcattcattcaataaacttttattgtgtgtc

SEQ ID NO: 726 - DNA, 3264 bp, Homo sapiens
gcacccgggcgctgctggcggccaagctggatgggtcgccagtgagtttcggtgcggcaccgctggcccaggcccgggcgcggctggacatggccacctactgcgacgacctgggcccctcctcggccccgcccggccaggcccaggccaccgcgcaccccccgggctatgagccaggggatctgggcgcggtgggcgggggccccctcctgtgggtgaacgcgccagcgctcagccccaagtcctacgcttcgggtcccgggcctgcgccgccctacgcggccccgagctacggggctcccggcccgctcctcggcgccccgggcggcctggcgggcgccgacctcgcctggctgagcctctccggccagcaggagctgctgaggctggtgcggccgccctactcctactcggcgctcatcgccatggccatccagagcgcgccgctgcggaagctgacgctcagccagatctaccagtacgtggctggtaacttccctttctacaagcgcagcaaggcgggctggcagaactccatccgccacaacctgtcgctcaacgactgcttcaagaaggtgccccgcgacgaggacgacccaggtaaaggcaattactggaccctggaccccaactgcgagaagatgtttgacaacgggaacttccgaaggaagaggaagaggagagctgaagccagcgcggccgtgcgctcgggagccaggagcgtgggaggggccgaggcgccagcgctggagcccccgagcgcggcttgcctggacctgcaggcctcgccctctccatccgcacccgaggccgccacctgcttctccggtttcgcttctgctatgagcgctctggctggcggccttggcaccttccccgggggcctggcgggcgacttttctttcgggaggcggccaccgacagtcgccacccacgctccccagacccttaacccctcccctggcttcgcccctggccaccagaccgcggccgccggcttccgcctcagtcacctcctctacagccgggaagggaccgaagtttgaagggaggctggaggctagccgggtgcgggtccagaggtgctgagctcaggcctccggtttcccctggtgacagccccacgtgttggcgttgaaggccttggtgccctgggaggaagcgcagagccgggggcggctcggccagcagggagctgggctgagcggctcttgggctttggggtgggtggcccttctgctgtgcacccctcacccaggcgaccttcggaacctccctgctctgcctctaagtccagccgccctgggcgtctagaacctgtgctctcgagggatttgccttgaaggggcggcgggtcggccctcagctccagcgttttccaaggaggctggctgactccaaagagccttagagcagatgggaagaaggtgggctgccagagcggcccaggtggtgggggccctttccacctccacccagcttggcccacctggctcagggccttcccttctgcttcagggaagctgccgcaggggctgggggacagagctcaggagcagctgcagtgggctccaggtgggccaggagcctgcagtgaggggatctgagacagttggcattgggtcctgtgtaaggaaggtcttgctaatggttggaactgctggtggtgggagggagaagcactgcgtgggcagaaagcgcccttgggataccagctcccttccctgtcactcagccctggtccttgatgacccccctctaggacaaggcaactccccagggccccgccaccactgaccacaggagcggtgcccagcacccaggagttccccaagggtccaggtttgtgccacccacacccacactcacacccacactcacacccacactcacacccacacccacacccacacccacactcacactcacactcacacccacactcacacccacactcacacccacacccacacccacactcacacacactcacacccacacccacactcacacccacacacactcacacccacacacacccacactcatactcacactcacacccacactcacaccacacccacactcacactgacacccacactcacacccacactcacactgacacccacactcacacccacactcatactcacactcacacccacactcacactcacacccacactcacaccacactcacacccacacacacccacactcatactcacacccacacccacactcatactcacacacccacacccacacccacacccacacccacacccacacccacactcacacaggctcatggaaggccacacttgttttggtctctttcccctccaaacccacagtttgagccaaagctgtgcgtgtgttcagagctcctgaacagcagcctcctgtgtaaattgaaccctgccccacccagttccttcttagggatggtatctttgtgaaggacaaggagcccccagtcactgggaagaggaattttttggcctctgtactccttagaggacctaagtgccccagtcagatgccctgagtctttgtggcatctgggactccctggagatggagacgttggtggggggggggtacccaccttgttgttgatgggggtacctatcttccctgcattttgggggagggtgggaggggtccttcccaggaagagagtggagacaggttactgttactttggagtgggacaggctggtttagcaatcctaagccccagccacgcaggtattcctgatctgcctgcagggcccctcactgcagctgccaccagtgctggaaatgagagcagggctcctgactgtccctagagctgactcatcatggccctgctgaagagtgaggtgtgtgtgtgtgtgtgcgtgtgtgcgtaagacagagagggagggagaaggaaggaggcgggggaacatggagagaaggagccaggagttgggataaacctggccctggtcatatgtttcatcagcagtggctcctaactccacgtgccatctctgctgctgccctccacaagcaggtgagcagagtgccagttgtgttgaaggtgatgatgtcgcctaactaaactcacaaccaacccgcaatctctcttggggggacactccccataagcaatacaattaaagaagaccaggaaaggaaaataaattccttagcttatacatttaaaaagtatcccttgaacctattttaatagaatgaaatgctaaaaataaagaccaatataacata

SEQ ID NO: 727 - DNA, 72 bp, Homo sapiens
ttgcaatgatgtgaatctctcactgaattcaaccttgaagtgcgaatccatgagctttttaaccctgagcaa

SEQ ID NO: 728 - DNA, 2138 bp, Homo sapiens
ccacgggcaggttttcagacaaaggatccctggcaatcaggggacacctcaggtctgggctgagatgtgtgcagagggcctgggtcctcctgagcccctgcactggggggggaataagagacaggcccagcaaggggctgtccacttcctgtgggttcacagctgtggggacccaggcaggcggcagcaggctctgacttaaccacatccgtgcatctgtctgtcatggagggccatgtggtcacctgtcccacagctggagcacgcagagcaggcatcatggtgtccatcctcactgttcttctgtgcctcagtcagtggtggagagacgagggacaggaggggcactgggctgaggtggggagggtcccacagcagccttgttcaccagagagcctcagggctccagtggctactggtgctccaacaggaagggaagcagccacacctctgtgttccaaatcccccacaggaaactcttctccatggctgagtctgggccagaaagcccaagcacttgcagggaccctccccaaacccagcctctgggctgagccaggctctgtgattacctgggagagccccatgaccctctggtgccaggggaccctggatacccagggttactatctcaccaaggaaggaaaccccatgacctggtaccaacagagcccaccagagcccaggaacaagaccaacttcttcatcccatccatgagagagcaccatgcagggagataccactgtcactatctcagccctgcaggctggtcagagcgcagcgagcccctggagctggtggtgacaggagcccacagaaaacccactctctcagccctgccgagccctgtggtgacctcaggagagaacgtgaccatccagtgtagctcaagggtgggatttcacaggttcattttgattgaggaaggagaaaacaagctctcctggatgctggactcacaggaactctccaaggggctgtcccttgtccctggccctgttccctgtgggccgtgtggctgccagtcaccggtggatgttcagatgctatgggcattacacgaacttcccctgggtgtggtcggaacccagtgataccatggagatcctggtcttaggcgtgtctaggaagccctccctcctgaccctgcagggccctgtcgtggcccctggggagaatctgaccctccagtgtggctctgatgtcggctatgacaaattcactctgtacaaggaggggggacatgacctcgtccagggctctggccggcagccccaggctgggctctcccaggccaacttcaccctgggccctgtgagggtctcccacgggggccagtacagatgctacggtgcacacaacctctcctccgagtggtcggcccccagtgaccccctgagcatcctgatcgcaggacagatccgtggcagaccctccctctcggtgcagccgggccccacggtggcctcaggagagaacgtgaccctgctgtgtcagtcacgggagcagttggacactttccttctgaccaaggagggggcagcccatcacccactgcgtctgagatcagagcaccaagctcagcagcaccaggctgaattccccatgagtcctgtgacctcagcccacgcggggacctacaggtgctacagctcacgcagattcttcccctacctgctgtctcaccccagtgaccccctggagctcgtggtctcaggagcagctgagaccctcagcccatcgcaaaacaagacagactccaagactgcctcacacccccaggattacacagtggagaatctcatccgcgtggctgtggctggcttggtcctggtggtcctcgggattctgctgctttaggactggcacagctagagaagtccccaagatgcagcaaggaggtaaatacatgagagaacaatgcacccttcagagtgccagagccttggcaatgaatctgatagtcctaggaggttctggaagaaagtctggaccatcattcgggaaaccgtctactgagaaagtcgagaaggggaggcttgggtcaggttcaggaagatgtctgggtgcctgtagagaacgcttcctccattaaacttccattaaatggcagtgctttcagtccaaaaaaaaaaaa

SEQ ID NO: 729 - DNA, 1234 bp, Homo sapiens
aaaatattagtccaaggatccagtgagagacacagaagtgctagaagccactcctcatgaactaaggagaaaaagaacagacaagggaacaccccagacatggtatcagagatccacatgacaggcccaatgtgcctcattgagaacactaatgggcgactgatggcgaatccagaagctctgaagatcctttctgccattacgcagcctgtggtggtggtggcgactgtgggccgctagcgcacaggaaaatcctacctgattaacaagctggctcagaagaaaaagggcttctctctgggctccacagtgcagtctcacactaaaggaatctggatgtggtgtatgccccatcccaagaagccaggccacatcctagttctgctggacaccgagggtctgggagatgtagagaagggtgacaaccagaatgactcctggatcttcgccctggccgtcctcctgaacagcacttccatgtacaatagcataggaaccattaaccagcaggccatggaccaactgcagtatcctttgtgacccagaacagcaccaagtggaacgtgtgaaagctgagtctgcacaggcttcagcaaaaatgttgcagcaaatgcaaagaaagaatgagcagatgatggaacagaaggagaggagttatcaggaacacttgaaacaactgactgagaagatggagagcgacagggtccagttgctggaagagcaagagaggaccctcgctcttaaacttcaggtgtctaattgcatcaccttgaggtttctgtttttctgttttctctccattctccccgatcacaggcttactgtggcagagagaacatgaagcccaggggaagaaccctgcttgcttacttgtacttttcaattcctgtctgtccagcctgaactggctactgccaagtctggtcactaaactgcaaatattgcagttgtgtcacattcagtgctttatctatatatccttcatttcaaggcaggtattatctgctagccatcattaaagtatctgtatctcttgcttaataccatgtgaagcaagaactatattcttattacttaggagaagaaacaaagtttccaaaaataataaataaatagagtcacacagctagtaaatgtatcaaagctgtcttcatcacttagtggaatccacaatgattatttttttctgtgacacctagtatgaaattaaacttaagaaaacctttgtgagcag

SEQ ID NO: 730 - DNA, 103 bp, Homo sapiens
cttcctgctggcatatatgatgacttagcttttttccccgacagatcgactatgttgatctaacttttctaagccagtttctgtctgatatgccagcttgagc

SEQ ID NO: 731 - DNA, 137 bp, Homo sapiens
caggctgtgatgattggcgcaggggtacggacctcagctgagtcatgggagctgaatgtatgtgtttctcctttgtcctgcatgtggcaggctgatggggagcacttacatgagactgttgcctcaatctgagcctg

SEQ ID NO: 732 - DNA, 2700 bp, Homo sapiens
aggaccggaggcgcgacccctcggcccaccttgaggcccggcctaggactggaggcgcgacccctcggcccaccttgaggcccggcctaggaccggaggcgcgacccctgggcccaccttgaggcccggcctaggactggaggcgcgacccctcggcccaccttgaggcccggcctaggaccggaggcgcgacccctgggcccacctggcggcccggccggcacagcccgcctctcctctccaggccagggccccacaccttccgcctgacagccagccaagctcttcagtcccccgccctccacctgccagggaggctccgggcgttgtacctgccaccacggggtaggtctggtacaaagcactgggaatacaaccttgaacaagacaagaatcctggccttcaaggaacttcgaaccttttgggggatatgataagacacattaggaatcaccatgttaatggttatctttcttgaaggatataagtccagacacatatactcacagaaatgagttatttaaagaagacggtccagattccacagtccaaaaaaaaaagaggtttgccctgcttctgaaggagtcagggtatgaatgcagaggtcttcctgttggctcacatatcagatcttcaacgtcaacattaaatgcgagtgatgcttccccctctgtgaatgtggctttgggtatggctaatccacaccctgcactctggccttcagaagcccagggagagaagcctcccagaagcaaccttccagaaccttctccatcctcccaccgacctccccagcccctgtcctctctttgaatctcgttgtcaagttcttcccgcagacacctggctccttgaggggaggtgcagctttcatctgaccatgcaggcgtgctttgcagtgggtagagcagtgctttcctcctcccagctgcacactggaatcacctggagagtccagaaacttcccgcctcagtgaaagaacatcagtgtatcagcacagcaaatattccaaatgccaggctggattccctccaattaccaggacctccaggcttctcctcctttcaagaactttctgaccctggatccagtctaaatgttggttataaactcacctgacatccacagggcccttccaaaatactgtcaaggctgactgctggtgcctggaacctgcacaccctcctgggactctgcatctctgctggggctggtttctcctctgagccaccttaaggaatcccaccctgacccggtcagagctcaccatgcctccctctcctacttgctcagcattttgtgtctatctagactgaagcctttgctttctctctgtgattgtggtgaaagttcagtttgctttcctatctctagaatgtcagcacgaaggcagaggcatggtctcctgagttccataaccccaaagcctaactccctgcctgccacactgaggggcttagtagacattgacttactaaattgaatagttgagtaataatgctctttgaaataatttggagttagatcttgagccttgtgtggccagaggatgggtgaggacacatcataaaaactaaaggtaactgagcatgccagtggttggggtgagaaatttgcatggagcactccagacacagaggcagcaaaacccaagtgctgggaagtcagagtgagagagtgaaggggcagtgagtgcttctttaggagctggatcaaaacctaagatgatctggccacatggtgcagactgagcacacacttgggagagaaatgggccaggaggagaggagagaggttcaccacaggacagtggatgactgggaatagaagccctccccatggtggaccaagaagtctgtgaagctgagagaaagacaaaagaaatcacgacttctgtaggtagctgggatggaaacctcaggggtgacagggtctttaaaggaaatctcaaggaaggcatcatgttctgggtgtgctccagggatgctgagtaagaaaagaccagcctttctgtgtgtgtctttactctgccacaaggcacctgggctcctaaatgaccaatacacatgtgctatactggtgccaagaaagaagggtgttttgtaggaaagtcaaggtgagaggaggtgcccaggacttggctcctttctttgaagggtgacggtgtaaattctccatgctggggatcctactgatggatggaggcatgtcgatctcatcatttcacagagtggggagctatggccacaacgtgcctatcacacaagtccagcctcacgtcagctggacaccagctgttctgacacttgtcagcacatggggcacccggaagttcatggtgttctgcaaagaacgccacaaaacagtgagctcaacttcttgaaagtcataatgtgttgctaagtccgatcccagatcctaaaaataatatgaggtagtggccattgaacagaaaaaatttacatcttaaacttgaagataagtacaagtgtacctttttctaccactgttgttcagttttattatattgacaagcacctctgcccaccctgtggggtaaaactgtttgaaagtgtttatgaaagttttatataaatattggttgatcaaatgtacaaaatatgcatgatggcaccatattgtgtataatagtgacaaatacagtctatgtgggtggagaaacaagctcggtgttgtg

SEQ ID NO: 733 - DNA, 1365 bp, Homo sapiens
gacgcggcgggcggctccgggaggcgacgggacccccaggccggcagccgagtgaagaggcaggaactgtctacaaatgctccggctccgaagccccgagggaaagagcatctttcacggagcaccaggaattgacgacggtggaatttgctcagatcccctgaggccggttctttgagtttctgtctggccctccgggagaaccgtcccaaagttaactttgaaaacactcacaggagagggaaggctgtggggtccttcgcttctcaaaccccagatgcccccggaaagaacaccgcccccgaccaccaccacaaccagatgtttttaaaaagagatgctaagcaaaaggcctgattatgaggaatgagccaaagtcatgcaaggcgtggggcgctatgggactgcgcagtgacgacccagtgaagtagatgccttgacgattcccatttcacggatgagacgactccggcacagagaagtcagagggcctgtcctgggtcacacagccacaggcggcccccagaacgggacttcagggtgcaccactgcaccccagcagagacctccgcctggcacacagggaatgctggagcaatacttaaatagcatggcagcttttcgtgtttggaagccttcagaatcatttcctaccctctcaaggaacccattctttagaggtacacaccgttcctgtcagagaggctatcttcctagtgctaaatgattttttgatgcactgaaaattaaattcacactcaaatttctgcatttgaggagattttcctgtacgctgagctctgtcaaaagaggtatattgaagagagggtagttctgggaccatttgcaagacagcgcattgattggaagcctatacattctggagtgttggcttaatatgttgatcatcctttgaggtggggcacaaggaaaaataaactatttctccttcaggaacatacagtggcataagagagaccaacttggtgataactgatcataggattagaccaaggtgcagaagcaaacagaacctccataaaatgtaatgatgtcttgtgcctgcaatcctagtgctttcagaggccaaggtgggaagattccttgagctcaggagttcgagaccagcctgaacaacacaacaagacctcgtatctatgaaaaaataaaaataataaaattagctgcacacctatttggtggcacacacctgtggtcccaggtactcgggaggctgagatgagatcatttgagcccaggagatcaaggctgcaatcagctgtgatcatgccactgccctccagcctggacaactgagcgagaccctgtctccaaaaaaagtaaaattaaaaaaaaaaaaaaaaa

SEQ ID NO: 734 - DNA, 2876 bp, Homo sapiens
tttcctttcagaagcactgctgacagtttggtggttgccattgggacagtgagccttttgttctttctgaggttgggctggtttctcctcttggccctgccctacagaccgtaaaggaaatcagcaagaagtccccagcaaacatccacagatggccctggacatcagccacattctgagaaacatgtcacgttctgggagggctaaggcatcaagtaaggcctatggggctggagaatccgagggcaggtggggcaacccagagccatgggggctacccatgggaattgggaggtcccaaggcagatgcaggggttccacaggagaagtcccagagccaccaagtgctctcctgtcccagggagcagtcaacaccatggactgaacacttactgggcttcaagctctgggccaggctggggcatgtggggccatgagggagctcagagtgggagacagagagacaagtgtgctcagagggcacccatttctgggtgtaatgtggtcctgagattttggctgagaagggtttccagggtttcatatgtgttatggagctgcttcctctccccagcctcaccttgcaggaatcccagtgaatatattgccaccctatttgagctcagtgccctcatagtgtaatggcaccagcagatctgcctgtgcatggacttcctgtactacccattcctgaggggtgatgcttctgcagggcctatgacctggtgcacaactttagacaccatcatcctggagcagcactgcaccctcactagccagggtgttcatgacttcctcaaggccaaggccacgttcaagacttgggacttcagtgatgcacttgtgctgggcaaggtggcttctccggtatcttaatttgccatggaaggtgctggataaaggagggacagtcagatatgtcttagagatgactgtagaaggctgcctggaaggagtgaacaagagccaggagacccaggagggagcttgtggggcaggtctggagatggcaagggagggatcctgcttggatgaaaagtcttcagggactgtctcaggttacactcaggtgccctcagagctaatgtgttcagaggtcttgtctccaggatgaaaatgggaaggagttgtcagaagaggacatataaatggaggctggcatcttcatgagtaccagcggtggtcccggtgtgggtctctccatccagggacatggtggatggacactacatcactccattctgcccttcctttccctcctcccattctcccaagggcctcagtgcatgggcggtgtccaacctctggtgctgaatcagccaagagatccaagcctgcttggctgcctcttaggatatgaaagcacagccactgggctctactgaatcctatgcaacctcagaagacacccaggagtgatgccatcacgtggtgcaagagttctgagggaccgcaatcctgaagacattgaatggctgtgttcctgctcattgctggaggcactgtcaggggccctgtcctcaaccccgggtctgacacttgcagatcaggcaggacattctggaggaatcatgcccttggaaggatccctgaggagtgactgttgttagattaaaaaacagtggcaaagagcaatacagagagttgccaaaattcacaccgctggtccaggtttgaagcaagcaatctgtacctgcagtccttgtctgtaaccatggcaccctggcttctcacacatctcatcgtggagttccaccatgtgtcaggcatggcactgagcaccttcttttaagaatataatttgtaattatgtagattcttaattctacttcaaaatgccacacagccttcatgtgataaaatgaaacaattgctcaactgatctcctgggatctctactaagatgttggcagcccggtcagctggtctggccctggacgtgccttcagggtctggttatgcttcatgacctgcattgtggtcagtggtaagcagcacctgcttctagctttactgttgggtcagattttatccccactccagctctgcagtgtggctgcttcttgattcatccatggaccctgcacgaaattgccccatgttactgtttgtgcatcactgaggaaggaagcatgaaggacgcacaggtcaggccattccattgccctcctggtgctgggtttgccctcccaatcctggggttgcttcaggggctggtcgttctccatagccccctccacatttctcaggtttctgctcaaaagtcacctttcggaggggtctccacctgtcactgtgtttttaagagctccttcggtttctttctagctcatctcactctggtaatgtctttgattaccaccaccatctgacctggtcttatgatctgttagcttccttcatcagatgtgagcaccaggatggcaggggcctcatctgtcctgttcctcctgtggcctgggtcctagcaccatgtctggtacagtgtagatgctcaagggaagtttactttgtagaactgtttatctgggagatattactgttggtctaacctgtaccatattgtaaacctccagccattttgcagactttgatcacagtgaaacgttccatgggaacttgggccatgagaaacatccttcctaaccacgtgactgcagaaacatccttatcacatcctcctgggcaaaggcccaacagcctgactgcagggacatccttgccatatcctgctgggcagcaagctctaccacccagatccctccctcccagtcccatgattaccccagcctgtgagtggcagttggttctggcactaagctggtttcctcctccccagggttttgctggcaataaagatgttgctgttgaagcca

SEQ ID NO: 735 - DNA, 95 bp, Homo sapiens
ccagctcgggcagccgtggccatcttactgggcagcattggatggagtcaggtctctaatactgcctggtaatgatgacggcggagccctgcacg

SEQ ID NO: 736 - DNA, 3361 bp, Homo sapiens
attcccagaattgcttgtatcctccttctggagccagtgtgtacgactccacagagcatttggattacactcctccgaatgctgaaggaaaaacgctcaaaatctcattcttcagggggaagcgttgccactccgaggtgcccactgggaacgaatcccaaagccacgagcgcctgcctagtggggaatgtgaactgttatcctgagagtcgtccttctctctccctggtccaggacagaaaatactgaatagacaggaatttctgaagtctaaacgcctccaatgataacaggagtgttattggaaagggaacaagcgagaagacacagtcttcgaggagttaagttttgctaatctaatgatgagactgcattcatgaagactgagtgaagactttattgcaccatcacatcactaaggtttttctccaacatgaacattctgatgaagtcgaaggcttgaggcctgactaaagcacatatcacactccctacacttccatgttttctctcccatgtggaccctctgatgcatatcaagattcaagcgcctgttgtagcccttcccacagtcctcacatttgtatggcttttctacactgtgaactttttcttgcactttagagaatgaattctgtacaatgttcttcccatgctgctcacatttgagaggtgtttctctgctgtggcgtctctgatgggtcagacgagttgaggaccagctgaagcccttcccacactcatcacatttgtatggcttttctccagtgtgcactctttgatgagaatgaagctgtgaattctgagtaaatcttttcccacactcttcacatttgaatggtttttctccactgtgcagtctctgatgtttcaaaagacacgaggcccagccaaaactcttcccacattccttacaattgtatggtctctctcctgtgtggaccttctggtgcatatcaagattaaacttactattgtagccctttccacacttctcacatttgtatggcttttctccagtgtgaactctctgatgggaatgaagatgtgaattttgagtaaatctcttcccacactcttcacattggaatggtttttctccactgtggagtctctcatgtttcaaaagacatggggcccgactaaagctcttcccacattccttacaattatacagtttctctcctgtatggacgcgctggtgaaagtcaagatccaacctccttttgtagcccttcccacactccacacatttgtatggtttttctccactatgggatctctggtgggaatagcattgtgaatttgtgtaaaatcctttcccacattcttcacatttgaatggtttttctccactgtggactcgctgatgtttcaaaagacacgaggcccatctgaagctcttcccacactctttacaattatatggcttttctcccgtgtggaccatatgatgcgtataaagatctcgcctacaaataaagccttttccacactcctcacatttgtatggtttctctcctgtgtggatcatgcgatgactattaagtgctgatctctgacgaaagctcttatcacacgtatcacatcggaatggtttctctgccgtgtgaaccatggaatgcctattaagtcttgatctaccacagaagctcttaccacatatatcacatttgaatggcttctcccccgtatggattctctgatgttcttgaagctgggaatcgtgaatgaaggccttcccgcattcctcacaattataaggtttctctcctgtgtgtaatttatgatgaacattaagtgctgatctacgactgaagcctttcccacattccacacatttgaacggtttctctccagtgtggactctctgatgagtttgcagatgtgaactctgactgaattccttaccacacacgtcacacttatagcatttctctcccatgtggactctctgatgaatacgaagggctgagatgtaacaaaagttctttccacactcatcacacgtatgagatttctctcctgagtgtaattgttgatgaaaatcaaagtgggagacatcactgaaggatggtttatatccattgccctgggaagatttctgtcttgtgtgaattacagatagtcctgcctcagtctggcaggggaaatcaccttctttggagaactgagagctatttatcatcaagtcttgagacctggttaaatcacttgcaattttttcccagatttgctggaaggaccactcttgatgtgttcctgcttctgaaacagtctccatctcagtttggatcttgtctcctatcagaatacagaattaaaagatgaggacaagtgaagcctttgttcagtgttatcaagatttcacttaggccatggcaggaaactctcatgagtatagacaacattcagtttgtatttttcaagtgcaccataatctttggtttggatgaggccaatttcgaactaaaccaagtatcatatgtaaaatacttgatagaaataaaagacgaaaaacaatagatgttgacatgggtgtggtgagaagaaacgcttatacactgctgctggtgtgaatgtaaattagtacaacctctatgaaatacagtatggagattctctaaagaactaaaagtggatctaccatttgatccagcaatcccactactatctacccaaaggaaaagaagtccttacatcaaaaggacacctgcatgcctatatttattacagcacaattcacaatttcaaagatatggaaccaacctaagtgcccatcaaccaatgagtggataaagaaaatatggtatatattcaccagggaatactattcagccataaaaaaatgaaataatgtcttttgcagcaacttggatggagctggaggctattattctaagtgaagtaactcaggaatggaaaaccaaataccgtgttttcacttataagtgggagttaagctatgggtatgcaaaggcatacagagtgatataatggactatggagactcaaaatggggagggtggaaggtagggtaagggataaaaagctacaagttgggtacaatgtacactactcaggtgatgggtacactaaaatctcagacttcaccattagacaattcaaccatgtaaccaaaaaccagtatatactttaataaaaaaagactactgaaataaaatttttaataaaaataaaagacaataataaaattaatatgatacaaacattatacctgctactcttcctagtgaatttcctaatcagtctaaaatcttgcatggtaaattatgaagctaataaattgtgtatataataaaatatgaatcaaaaccaattttaaacaaaagtaatataa

SEQ ID NO: 737 - DNA, 1861 bp, Homo sapiens
aactgtgcctcacgttccttccaacggcgccttccatcccagctgggcggggcttcgccgtgttaccttctcaacatggcgagcttgctggacgtcacgtcgccttcgccttttccgctgcggactctgctcaccgacctcctcagtagagccggccctgctcactaccgcgcccacgtgtcctgttgtgcttcattcccacaggccgcataagaagtgggtgccgaggctcccttcccactgccattccactggcccagaggaagcttctgttgtgttcagatgggcaggcactcttcctcgagaagttaagtagccggaatatctaaatgcctctccttggcgattactcgatgagcgcctgtccttcctccactcttccagcagacctgccttttggggctgatggaaatatgcatattagattatctgcagaaactggctcagcactacaaggaggctgccaacatgaagacactggatgcggaatcaggaggagatgtatacagctcagtctccaaagccaggacaagccagctccaacacactactggctgaatctcaccaatcgttatagttttgttttttgtttttttaaatgtatttaagcatttttaggtgttttaaattttatgtgtgtattctaggaatatgtactcagattctttcattaggcatgtgttattaacaacattcatcttcttaaaggctgaaccaactttgcgcgttttatcaacagatattcactgagcacctaatattgccaggctgtgctcaaggcagtgggattcatcagtgaacaatacagacaaaaatcactgacctaaatggagcttgaagtttatatctaaatcattcaaagattctgtggtggaaaagaagttagaaatctttcagctgcaaaacataagccaaaatacaactcacctttggaatcagagaacttacaggttcataaaattgcgaagcccagatgtgcacctgaggtgagacttcgtccagcttctgtctgtgtcactaatctttcctgctttcagcggcatccctcgcaggcccgtgttgttcccaactggtgttcccacctggcggcaaactggtgactgtagttacagatcttcaacatcacactcaggagaagaaggagattgcttttcaggagctcctgcaagccggagaataaaagctcttatttattcagaagccctaaaacataccaccttggctatagactatttggacatttctaagcaaatctgtctgcaaaggtgctgagctgtgttgatcaactgaagcccgtgacgtctcatccttgcagttggagcaaatctcaaaggcaaagccagtgttaaggagagggaaatcagacttcatctttcgatgggagaagaaaagagtttgcaactgtctctattctgccactggcagagaatccataggtttgctaaggatacagagccacattgaaaagataaaccttgctatgctggagattacttaggtgggccaggatttcttgaaaccaaaactttactgaatcacctcttcaccatctgtatgccgtgcatttgctgagagataaaaacattcctgtgaaagatgcccttccctgcaccgggagaaaagaagcattctgcgaccaggagccatagcgaagataattctgtagaaacagaccgtggtaaaataatgcctatcttcctgcagcctccccacgtaatttagttacttttccacagctgcttctttttgctcaacctaatatcaaagcagttaggtattgccatttctttgggtcttcattttcttattcaggctcctgtgccatgtaaaacctctattaaatttgtatgattttctcctg

SEQ ID NO: 738 - DNA, 1130 bp, Homo sapiens
agaagaccagatactattctgaagaactacacagagggagacaacaatgtcatcactaaaagtaccacacacacggcctgtgtccttgtctactggttcttgtgtgataatcacagggacaccgatcatccctttcgtcatggacccacagctgcaggtggatttccataccgagatgaaggaagactcagacatcgccttccatttccgagtgtactttggtcattgggtggtcatgaacagccgcgtgaatggggcttggcagtatgaggtgacatgccacaatatgccctttcaggatggtaaaccatttaacctgtgcatctccgtgctggccgatgagtaccagccgttcagaataatatcctacgttttgcaacacctgttttgttcctcctctctgaaaacatttgaatttccttctttgccaccaccattacatctctgggcaactccaaggagaaactgggccatcagcagtcatagtgaatgggagttatagttcatggaactgaaatgtatgcattcaatgaacactgtccagcactaaccccatggcaggccctgtgcaagacgcaaggattgaagttcatgagagacagtcccaggccatagggatcttccaggctggactgcagtggcaccattaaggctcactgcagcctcgacaccctgggctcaaaaattcctcctgcctcagccccccaagtaggtgagaccacaggtttactggactcatgcgggtggtagacacgcatgtgtgtgggagtcacgttttctgaaggacctacaggctgggatcccagaggattcttcacttatgtttgactcaacactaaggaaggactttcaagaaaccaaagaagaagctgccaggcatcatagaacttagctttgaaaattggagagtgtcacttttctatgacattatattgattaaggactggttctcagcaacaatcggcttcaccctccactcttcccttcttggagtttctaccaagatggcagaatgacagtccttttccctctataagagctgagatcacctgcttcatagcaaacctggagaaccacttagcagaaacaacatgttacctacaaactaatgaaggcagattgagtaaagt

SEQ ID NO: 739 - DNA, 3220 bp, Homo sapiens
gagccaaatcccgacaggacttgttactttcacttgctcttttttcctcccattttagcagccaaggatgggaattacacagcgaaatgcaggctaatcagctaaatctagattaaatatgctagtccttggggaccttgagctgaattaatggaaaccgaggtttttaatgttccagactaattttggaagctcacttccagcagaggcaaacttgaggctgtccaaagggagcagatggcaaggctttctccaggtgcaccaacctttgaaacagccctcggcaaaaccatgaggaaggaatgctcttcccttagagatcctcgtggtgaattccctcatttccttcaagtctgctcaaatgttacttctcaaacagagcaagaagatcgaagcaaatgaacaaaggtgggatccggttccaataatgaagaatgtgatgactacatgtataccattctggaacagagaaaagactgcctgcagcaatatctctaaaaactacctgtggcagactcagtggatggtcaagtttggctctgaaacaagtctcctcatttgtcagagaaaggacagagaagatccagtttatgtgattaattcaatgatattagtagagatcatagatacaatgatcaaaataagaacattgctttttgcaaaatcagattaaactgcactccaaaacaatactgaatcatgtaaaagcagaacttcctctcagagatttctgtatgcaaagacaaaacaattaggtcacaggataccatgttcttgagactgtatgtccttactaagtttcattttcattcagatatgtacaagaccatttggtatttgtaaagaggttatgtttatctgtgttttcctgaatatagaatgaatatctttatgacaaaaaactttagctcagaagaatctttatcgcatttaaaataattaacaactatagtgcataatgtataattcaagggttttctgtagcccatttcccatctaccctgtccctgtccccatactccttcctcacctccacccaacctccaccagagataattaagcttttaagaatgagattgatcacttaaaagtaatatatttttactttatttctttaatccatgtttagactttcctacctgccaaaactttgtatcttttaaacttggtattctacttctttctcccatctcaaactatacgtaaatcagtgtgttagaaattccagtgagtttaattgaacagaaagttggggtatcttgtatcccctccttttttttcttttgggacataacctttgtttcccacttgtgattccagaatctatcttggtatgattcaacaccttttatcagctgcttctaaacaactttcaccaccatattgcctcctcattcttccgaaaatacactattttctagtcaggccaaactatacattctttccagagctgaccacacttgttatgttatattcccagctaaatgccttctgtaacatttactacttatccttctggatacaaccccaatgtcaccacctccttgagagcacccctgattccacagggttgagagtcagggtggcctgggaagaccacacatgtcctctgccatcattcagaggtgggtataagtgaaatgggagagttccctggtccccctcacaggatgtgtgacaggggtatggctctcttcttggctgctatgagctcaaagcccttacaagaggtggagcatgcagatgagcaggtgcaggaaccagagcgagagcttttggggtcccgccccacagcagtgtctaggggtgagtttctgtgattcccaaaacccaagtgggcacatgttacagtgtgctcttctagtgttgctgtccaagtgttaactagcttagtggaccctctgcctttttgcaagggcagagggccaatgtgacagctttctgtattctgagctcttatccagcatccaggaagaatcaggtgacacagggacttgaaggatgaatgtgggggttttattgagtggtggaggtggaactcagcaggatagatgggaaactggacaggggatggagtgggaagatcatcttcccctggagcttggccatccactggctgattctctgaccatccccagctgaactcctcctaacagtccttctcttctttcctctgctgcattgttctgccatccagtttgctaatctccttgtttcctgtctcctcatctgctcctggagcctggggttcggagtttatacgggtacaggacagggtgtgtgtcaggtcaaaaggcagctttttgggcatgaaaacaggaatgcccgtcctgtatccaggctagagggtggggcttttgctggggaactgccctcttctacccagtatttccctgtctcctttctgcatcataaagatgtgtggtacccagttggtgcagacgcgaaattcatctgtttctttatgttttctccctttgctctaaaagggtccatatttgcctgcattctagtgctcaccacaccacattggggtatttggttatgtgtctggtttcttcagtagcctaatggtgttccctgtgcaagattcttagatgggcctcaataaaatggttgagttgcactgaattgtgtttctaaagtagatatcatgtcttatttccaccagggcacaatgtctagcacttagaagcttaaaaaaagattgttgagatactaaatgaatagattaaccaaaagtttaatttttctagcagtgttcatgggtgggaacaaagcagtaaaacaaacacatacaaaaataaatggaggtcaaggacctataatactaaatgagctagcaccatttcatctggctgtgctacttcctagctatgcaacctgagacaaatcacatatactctctgatcttctatttcattatctgtgaagtggacacaaaaataatacctacctcttagcactgtttataaaaccaaataaaagtaagtaaagtgcttagcagagtgtgtaaaacacaaatttgtgctcggtaagtgttagttattatcatcttattgtttcctgaaaggcctccagctatgcttgttaagaaaggcttttattaagtgtatttaaagatactaatgattaaagtaatgagagtcaacacagtcaatatttattgagtgcttactttgagccagtcatctattctcactggattacaccattgcaa

SEQ ID NO: 740 - DNA, 1059 bp, Homo sapiens
gtcactgagccgcgccagctgagccaggtggagccctactttcctctcctgctttctgcctgtgactagcgccgtcccctaccgcccgtcgaccccacttccatgtctggcggacacagctccccggaacctccacgcccatggccactagacagagggagtcttccttcacctcctgcttttccacctggaattgcgacgcgggcgacgagggcgtgggctgcacctgcgaagatgcttccttgtgcaagaagcgcctgtcgggcgcgggattcggggctggcatctgggacgcgggctgaggtgggaggcgggcctgcatctgaagaatacgctcggaggctggcaggttgctgcccccgcctcgcacgaccctcgcttcccacctgtgaaatgcacagaacagggcttcatttatttaacgaatcgtttctgagctcctgctgtgagccaggcttggagcaagcctgggtactgtggatgggagcaggcccctgaaccaggcggacggggtcttggcgttctcggagctaaacgctgctagaaagacaaacatgatgcacctaactactgtctccgtagattatgaggatgagaggtggaggttctctctcttttaggtatgatccccgttgtgcacctgaaactcaggcgatgactttcagtgaaggaaatgacctgtctagggccacataatacctgtttgaaaagccagtaccacactaagtctccactattaagggtgtgatggtgagggtggggtcgtagggagcacaggtatgtgtcagaaagagaaaacatgaggcttgagtgtcctccatttattcactcattcattctacaaaaatggagagcttactttgtgccagggccttatttgggctggttggtggggattcagtaatgggaatacaccaagaacaagacagacgtgctgccagacatactggaactcacggtttagttgggaaagactgacaggaaataattatccatgagatacataattaaaatttggtgttgtgcactgagaaataaaaaaaaaaaaaaaaaaaaaaa

SEQ ID NO: 741 - DNA, 3708 bp, Homo sapiens
cacgaaacttttgtctgtgtctccccataatgtgacctttagaagttgccaatggcccacccaatacccaaccatgatttttctgagataatctgcccgaggtgtgtgagaggaaacgcgaagaaggcagtcaggaggattcactcttgggggagctgggtaggatcctatctcctcctacatccagagcatgcaggctccatttagatacaaaggggtgggattgggttcctggggagaaattgagcccctttgattctgcggttctgtgggtctaaatctggcatctccttggctatccacccccaggctttgtgattggttggctgtggttggtgggggggcaggaagctgctggtggagctgcagcatccttcagtctcaggcccctgggagggggaggggaaagaaccagggctgagctgtggagtgaaggggagccatttctctccaccgactgcaacctccgtgctcacagctcacggttcaccagaatccaggggcttggtcggcctaggaatccacaatgctggatattttcatcctgatgttctttgccatcataggcctggtcattctgtcctacattatctatctgctctagtggcctggagctgcggccggagcctgctggagaacagctcagaaggaaggatggagatgaatggccgagtgccctgcttgctgacgcaccggtggatttttgcttctgctgttatctcggctcctggtctctccagtccaacaagaggcctctcatccacagaagcagtcctactgcccagcagacctctttcagagccttccagacatggctgacccctggcaagcaaggggctttttgagctgagaggcacttggctgggacttcaggaattcatggacagggctggcagatactgcatatgtttgagctgtagatgggattgagaacagaaagttgaaatggagacttattaaagttaccgtggagaactgctcaaaaattcattttgaattaaggaaacttaaattcattttaagtttccttagatctaaatgcaactgcacattacactcaaatatgttccttccttctcacacacaggactcccttgtgaaactcaaggggaagttcaagttgtccatcttcatctatgaagtagtcactttatcactgtctttacagattgcacagtctggggttttgtggtttctcttgtctcactctccagccaggaagaacttgtcatttgagtttttaaaatgtatcatttcttccccacctcaaaccacttgtatcccagtttctcatttaaagggagaaatggttatatagtcctctctttgcacctgattgaattataaatgatagaaacaagatggctatacttatttaggaaaaatctcttaccccaaaatgagtgtgtgtgtgtgtgtgtgtgtgcgtgtgtgtgtgtgtgtgtgttttaatcaaagatcttttctggaaaaaactttccacatagttctctgacccattagagttgaagaaactatgtattttgggattcagagtagaattggcctgcaaatctggggtgtttattccttttacaagtctatcataattgttctacatttaattttcctttcttgcttaaaagtaaacaaggagagtcaggagtggtggctcatgcctgtaatcccagcactctgggaggccgaggcggatggatcacctgaggtcaggagttggagaccagcctggccaacacggtgaaaccccgtctctactaaaaatacaaaaattagtcaggcacagtagtgcgcgcctgtagtcccagctacccgggaggctgaggccgaagaattgcttgaacccgggaggcagaggttgtagtgagccgacatcatgtcactgcactccagcctgggagacatagcgagattccgtctcaaataaaataaaataaataaataaataaacaaggagaaagattagtttttagtaataacattgtgtccaatttccatgttttaaaacaaaaattgaggcattatatgtcacaactgaaatggaaaagttgtgtttaaaaattatggacaaggccgggcacggtggctcacgcctggaatcccagcactttgggaggctcaggcaggaggatcacttgaggtcgggagtttgagaccagtctgaccaacgtggtgaaaccctgtctctactaaaaatacaaaaattagctggtgtggtggcaggtgcctgtaatcccagctactcaggaggctgaggcaggagaatcgcttgaacctgggaggcagaggttgcagtgagccgagatcacacctctgcactccagcctaggtgacacagcaagaccccatctcaaaaaaaaataataataaaaacataaaaattatggacaagaaaaaacactattctggaagctttgttttggcaacaaattatatgacctgacctttcataagtcatttaaactttagggctaggccaggtgctatggcgcatgcctataatcccagcatttagggaagtagaagcaggaggatagcttgaggccaagaattccagaccagcccaggcaatatagcgagacccccgtctccacaaaaataaaaaataaaataaaaataaataaatacataaactttaggtcctctgtttattctgtcaaatgaaagtgttaggccaaggtcgcattatctctttggaaactacatcgagaacagaattcccatggaacgaactcttaatagttcactggtagtcccccttttctgaatattcttcccaacatgacactttataacaaaaatttaactgcaaaactctttttttttcaccaacagccagattttgatgagaaaatggccatatttatttactccaaatatatattatgtctgtgataatttgcctaaactgtttaaggaatattaacaagtatgatactgcatcgtggtatgtagcaaaaagataggtaatctgacatacatggatgcaagcagcatggctgtgaacctggatatatttagaaatgatcttcagtggagtccttgatgtgacattttccactaaaacattcttctaactctggtatatcttagtgtttcgaactataatttccgtcttcaagccaagacagcagctctacatccttacctaggtaattcaggcatgcgccagtattttggaggggtccaaattagagttagttatgatggtatagatctttaaagtatagtctaaccaagcttgctctggtcttttgtgacatcaaggcttctcagtctgtattcacataaagttgaaacaactaatcaattcagtgaaaaaaaatcagcagatttcactcatacactggtgatatataccactggtattgggtacaatgtaaggagagaggattacccatctcttcagttacttgtaaaatatgattttaaaaaaataaatcaatacattttggaaaaattatatgactttgtgcttatatttatgcaacaatatgctagcttataacagggttttactgtgttattttgatagttgtttaaattttacatttaaactatttgtattttggcatcccaaaacataataaaacactgcaaaaagttacctctgtaatataagattttgtataaattttataaatttgtgtcatagggtaattttgtccaataaaatgtcaatgagataaaaaccaaaaaaaaaaaaaaaaa

SEQ ID NO: 742 - DNA, 978 bp, Homo sapiens
acttggtcacagtgagtgaaggaacatggctctgaatcatgcctgtctgtctccccaggtctgtgcttaaaaccacgaagttcaagatggaaactgaagggaagagtgtcaaggggatgggagagaggacttgtccatgactttggcagcataaggaaaaaatacccagggacaagtggcgactttggaaactccattcctctgcaaaatgacatcacgaggagagtggtggggcctgcggatgaaaagatctggcttctcctcccaactctgctatgaggaagcgctggatggccctgtcggccgcggtcatcgccgcctcggcccgggagctcagcattgcagccgcaccggaggcctgaaaccgtctcctccgctaccgccgccgccgccgccggaccgagggatacgacggttcccgagacagcggaacctgcggccgcagtcccagcacctcgggggaacgtagaccgcaggacagctcccagggggaccggaagtagctgcccccggagagcaatagctgacggaccacgtcctttctttcttttcccttagcaacaggccccggcgtcggttgctacgctgggctcagttgcctggggctgcttggttttcagatttgcttaggctccattcataaatacagatggcacacttctaggatggaccctgggtcatgatttgaatttttcgatgtggggaagggaggccaacagccgaaagtcgggtcaggcctctgctataattagttattattgtggccagagtggaaataggtcgcagaggaaggaactttaatgagcatgaggcccatctctgacgatatcagtagagaaatcaacgtctttaatagccaacaaacttattgtttacttgggtgccaggtatagagctaagtatgttacattcattatttacatttaatattcacaccaactctaacattacccacattttacatcccagggaacccag

SEQ ID NO: 743 - DNA, 2429 bp, Homo sapiens
ctggggctcttgagctataagtggcacctcagggccctgacgggcgtcttgccatgctgctcctgggcctgctgctgctgctgcccctgctggctggcgcccgcctgctgtggaactggtggaagctccggagcctccacctcctgcctcttgccccgggcttcttgcacctgctgcagcccgacctccccatctatctgcttggcctgactcagaaattcgggcccatctacaggctccaccttgggctgcaaggtgagaggctgatctcgctctggccctcaccataggagggggcggaggtgacggagagggtcctctctccgctgacgctgctttggctgtctcccagatgtggtggtgctgaactccaagaggaccattgaggaagccatggtcaaaaagtgggcagactttgctggcagacctgagccacttacctgtaagggccgggggcattttttctttcttaaacaaattttttttttgttagagatggggtcttgctatgttgcccaggctggtcttgaattcctggtctcaagtgatcctcccacctcggcctcaagtgggagccaccttcgggggcttccccaatcctccaggtcactggaagctcttggggggcatatcttcaggagaagaagcaggtgttgaggaggcagaagaaggtcaggccctcggcttccttggtcagttcccaccctccagcccccagctcctcctgcagacaagctggtgtctaagaactacccggacctgtcgttggtctctgctctggaaagcccacaagaagctcacccgctcagccctgctgctgggcatccgtgactccatggagccagtggtggagcagctgacccaggagttctgtgagcgcatgagagcccagcccggcacccctgtggccattgaggaggaattctctctcctcacctgcagcatcaactgttacctcaccttcggagacaagatcaaggaggacaacttaatgcctgcctattacaaatgtatccaggaggtgttaaaaacctggagccactggtccatccaaattgtggacgtgattccctttctcaggttcttccccaatccaggtctccggaggctgaagcaggccatagagaagagggaccacaacgaggagaagcagctgaggcagcacaaggagagcctggtggcaggccagtggagggacatgatggactacatgctccaaggggtggcgcagccgagcatggaagagggctctggacagctcctggaagggcacttgcacatggctgcagtggacctcctgatcggtggcactgagaccacagcaaacaccctctcctgggccgtggttttttttgcttcaccaccctgagattcagcagcgactgtaggaggagctagaccacgaactgggccctggtgcctccagctcccgggtcccctacaaggaccgtgcacggctgcccttgctcaatgccaccatcgccgaggtgctgcgcctgtggcccgttgtgcccttagccttgccccaccgcaccacacggcccagcagcatctccggctacgacatccctgagggcacagtcatcattccgaacctccaaggcgcccacctggatgagacggtctgggagaggccacatgagttctggcctgatcgcttcctggagccaggcaagaactccagagctctggccttcggctgcggtgcccgcgtgtgcctgggcgagccgctggcgcgcctggagctcttcgtggtgctgacccgactgctgcaggccttcacgctgctgccctccggggacgccctgccctccctgcagcccctgccccactgcagtgtcatcctcaagatgcagcctttccaagtgcggctgcagccccgggggatgggggcccacagcccaggccagaaccagtgatggggcaggaccgatgccagccgggtacctcagtttctcctttattgctcccgtacgaacccctcccctcccccctgtaaacacagtgctgcgagatcgctggcagagaaggcttcctccagcggctgggtggtgaaggaccctggctcttctctcggggcgacccctcagtgctcggcagtcatactggggtgcgagagaggtgggcagcagctcagcctccccccgctggggagcgaaagtttcttggtctcagcttcatttccgtgaagggcaccgagaactcgaagcccttccagtggtaccagctcactccctgggaaaggggttgtcaagagagagtcaaagccggatgtcccatctgctcctcccgttccccttaaggaggtggctcccagcactcaaccaacctccccgcagagctcccttcctgaccctctgccgcagaggattgaggcttaatcctgagctggtcctttccagccaataaatcaactccagctccctctg

SEQ ID NO: 744 - DNA, 3805 bp, Homo sapiens
aattagccagcccatccgtcgctcacgaggtcgcgcctcgcacccgccttcctccttttcttttaccctccccttcagaaaaaacggcggttgggctgcgacggccgccaaaggcggactagaagcggaggggtgaaaatcccggcagagaaggaagaagggactgcaggcgggaggaggaggaggataaggaggaagggagcccgcccagccggagccatctccgtcgagaacaaaatggcggcgctggcggagggccaactataaggcggggccgcggccattccccctccacccccacccttgcgccggccgggccggtcagggggaacccgctcgcttcgcccggccgcgggcggggaggggaggggagcggcccggcccactatgcaaagcgccgggcgccgccgccgccaccccgtggcaaagaatatgctttttgtctaatgatgttagataaaaagcaaatttggagcagttttcttattcgagttcaaaatggttcataaagcagcgaagacaactcaaaacatcagtaacacatttggcccaggaactgctaacaaacatacagtgcagtggtggcttaagaagttttgcaaggaagagagccttgaagatgaggaacgtgatatgggccatgggaagttgacaacgaccaattgagagcaatcattgaactacatgaaaaattacagaagaactcagcgttgactattctacggtcattagggtcgttcagcattcgaagcaaattggaaaggtgaaaaagcttgataagtgggtgcctcatgagctgagcggaaatcaaaactatcgttttgaagtgtagtcttcttttatgctacgcaacaacaaaccatttctcaatcggattgtgacatgtaatgaaaagtgaattttatacaacaaccagctcagtggttggaccaagaggcagctccaaagcagttcccaaagccaaacttgcaccaaaaaaaaggtcatggtcactgttcggtggtctgctgcccatctgatccactacagttttctgaatcctggtgaaaccattacatctgagaagtatgctcagcaaattggtaagatgcaccgaaaactgcaatacctgctgcctgcattggtcaacagaaagggcccaattcttctccacgacaacacctgactgcgtgtcgcacaaccagtgcttcaaaagttgaaggaattgggctacaaagttttgcctcatccaccatattcacctgacctttcgccaactgactaccacttctgctagcatcttgacaactttttgcagggaaaacacttcagcatggtgcagaaaatgctttccaagagttcgtcaaatcctgaagcacggatttttatgctacaggaataaacaaacatttctcattggcaaaaatgtgttgattgtaatggttcctgttttgattaatagaatatgttttagcgtagttacaatgatttaaaattcgcagtctggaaatttaatttttgcatcaacctaatatttctatggtaaatccttgcaaacatggaaacaatgcatttggcccagtgctttgtggttgtgtactctttttctttgtttttttaatagatggcattggccgggcatggtggctcatgcctgtaatcccagcattttgggaaggtgaggtgggtggatcacctgaggtcaggagttcaagaccagcctgactaacatggtaaaaccccatctctactaaaaatacaaaaaaattagctaggcggggtggcgggcatctaattccagctacttcatgaggctgcgacaggagaatcatttgaactcgggaggcagaggttgcagtgagccgagatcacaccattgcactccagcctgggcgatgagcgaaactgtctcaaaaaaaaaaaaagttggggtctcgctgtgttgaccaggctggtctcgaactcctggcctcaagtgatcctcccatcttggcctcccaaagtgttaggattacaggcgtgagccaccacaccctgcctggttgtgtactcttttaaatactaagtttttaatgttaaatgctgcttttagatacactgtaaaaatacacctatcaatgagtttttttattaaaaacattgcaattgtactagactttaaatactaagcaataattcaggcttcaatgttggtttatagttttctcatttctttcatttaatacctctgtaaaatgaagcagttacttccattttcctgaggtgagataagtgccctgcacaatgttataggcccagtaagtgagactggagctctgatctaatccctttgacattaaagtttgtgcagtaaaccagctatgtcagtttgccacatttgtaatagtgttcaataaattttcacttaaaggtttaatattaaagtagtagcaagaattcataaccttaattggctttaacagcttttctttccctgaaaacagatgcatatgtacacatgcacacagattgcttacaatatcagcacgtaaaaggcctttgcacattgaagtcggcactgctttggtgccttttttgttttttggctcggtgttttgactgcaagtctttttggatagaattttatagttagaaagtagctaacacttgggttttataggcacaaaaaacaagtcttatactagctgtactttattttttgagttcttattaatgaggaacatccacttttgcattgacagtgatttcaagattgctttatcagcctttaaaggattcttgactagtcgtgcacatcagaactgccaggtccccagtggttctgaagcagtaagctttgggtgggctctggcatcagcactttcactaagcttcacagataattctgatgcatactccaggcctgaaccactgatcaatttgaaacatgcataacaaagcaaaaaaagttttgtttcaccttttgaaatacagttaactcttttaccatgccagagatcattcagagagacaggtcgttgctccggagtgatacagatctggcagtacccagcccttgtgtgtgtgcgttagctcagcacctgcccacactgcgagcccccgtaggatgtgccttgtccttccctgtttcagcacttaacacactacctggtacagagtatgtagtgggcatctgttgaatgaatgcttttcccagtagcagtgtattcatacaatattaatataattgtcccctggcttacagataaaaatgaaagcatcaagtgcccagtgagtgagacccaggtgttcttcctccacccctagtggtcccctgggcaggtctttttttttttgtaacactcaccagtctgttctgtagtcaatcattgattgacttgtctgtgaacttggaggaactgtttcatagtttcattagcacagagtaaacatgtttgccatgcaaggttattttgcatctgcatttaagtgataatgttgaatcaatgaaaagtgttgattaagcagtagttgtagatatgctaagtttttcaaattactaatatcaagtggagattgtttttacttttaagggtattgcttttgtgatagcataaataatggttttccttttttgtaatgtaaattaattgctggcaacttttgtattcccatagactggggaagcttaattgcctttacaagtacttatgtacaactttgtatcaaattttctgtaatagtttatgctttagtactatatatgtactaataattttatctgacttctgtttatatcatttgtacaattacatggttgtaaaataaacttttaaacctcacgtaa

SEQ ID NO: 745 - DNA, 1939 bp, Homo sapiens
gctagaactggacacctcgggggtttcctgctttatggcgaaggacggagttttgctcttgttgcccaagctggagtgcaatggtgcgatcttcgcttactgcaacctctgcttcctgggttcaagtgattcccctgcctcagcctcccgagtagcagggattacagatggagcctcgctctgtcacccaggctggagtgcagtggcacaatctcgggtcactgcaacctccgccccccagcttcaagcgattctcctgtctcagcctcccgagtagctaggattacaggtgcacgccaccaggcctggctaatttttatatttttagtagagatgggattttgccttgttggccaggctggtctcaaactcctgacctcaggtgacccatccaccttggcctcccaaagtgctgggactacaggtgtgagccaccatgcctggtcccccacttgttgattttgcagaaaagatagctgtgttacaacctgtcctaaggtcaggtatgaatacttgtgcttctttcttggctccccaagccagagggcattcctatgcccaggtgagagagcacggagtgttactttggcagcacagtcagttaccagaggtaggaaaagcaaaggccaggcaggacatgaggggcccttgcactggctggttctccctgccttcaccaccctccaggtgaatgactgggtgaataatgattgactgaggaggtaatgaataatttatggacactgctggacctcagtctcctcatctgaaagatgagtggttggagaagtttaatggttttcaaatgctttttttttcagtcttcaaataagtgtttacgtagaagcaccatatctgaaacaggtgacagtggaccagtctgaatgaaatgagggttggcaggcctgagctccaaaaccttctgattgcccaagccctccttgtcttgcttggattatctccacacaaatggagaaactggacaaggtggtcatggaggtccctgaaagctcaaagactttctcattccaggattccccatgttcatatgccagcatggcatgggggtgctctgtagtcaagcagggtcctttggggggcttagggatggagccaggaaatggctctgggactcagcgggtgtccagagtctcatcagcagggtttctttactttcactgagtggctggtgcctgcacactgagttttgcaggcttactctcacagagtgagcttcctgcaggccccccactgcaacccctttccttcctggagctgtgtgctgactggtgcgtgagcaccccaggccctctccccatgctgctgatggtcagctttctctgcacgctcgtggttgccacagtcaacgctgataaaattgctgatgcagattgcctgcccagctgcgagtgctggcacgggaccagcagcccagacggtcactggaagtggttgggctgattattggcatcatctccattgtcctactcggttcttaaaggcatatggacttgcctcactcctacagcaaatgacggcatgggcaaagaggggcaacagacccaccctgaagacactcctcatctggttgacttggcagggttaagggaaaaagatgtgatgactaggagctgagagcttagtggttctgccagagctgcagagtctttgttggcctcagggtgggacctctcacatctctgtcagcttttcacagacaccaacctgttatgattcatttcacctgtcctgagcactagcaagaaaaattcgctgtagcttgtgatgtattattctggatttctcaactcattcatttgttcattcattcactataccattactgtctattataaggggggcacaatggtaggtgctgggaataaaaacgatgtttaacgtttcatgaggcttccctgtcaaaaaaaaaaaaaaaaaa

SEQ ID NO: 746 - DNA, 1113 bp, Homo sapiens
tatggtgtgccgggggccgcgcgggccgggagttgggtgggctgggggacaggcgcgcccgcgccgcccgctccagctgggctagtgctgcacattccggccagcccctcctcaagaccccattcccaagccccttctcagctccctcgggccggcagagcggctctgatcagtaaaatgctgttgaaggcccacgggcatgactgcacccctcactaattggtcattggtttggggaggacaccactgtcccagtggaaccttgagcacaccttggagccctcctcttcctctccggacctgtgccaaactgtgagtggcacagagcaaggactgtatgtgttctcttctttgttgcatactcagttccttgaccacagtgccaagcacacagcgagcactccctgtgtatctgctgagtaaataaacgaatgaacaaacccaacacatttcagccaagtcctgctgatgtttctcctccgatctagctcctcctttccagccttacttctgccactccagatttcacccccatcagcttcagactggataaaaggaaaccatttctctaaaggatcacttgctctctcatttcaggccatcctgcagccaccagaaccttccacatgaaatgaaaggctcaccacttcataggctttaaggaaattcttggccaggtgtggtgcctcactcatgtaatcccagtgctttaagaggccaagatgggaggattgtttgagccagctgtttgagaccagcctgggcaacgtcatgagaccccatctccacaaaaaaaaaaaaaaagaaaattggctgggtgcggtggctcatgtctgtaatcccagcaattttggaggctgaggcgggtggatcacttgaggtcaggagtttgagaccagcctggccaacatggtgaaaccccgtcactactaaaaatacaaaaattagccaggcgtggcggcaggtgcctgtaatcccagctacttgcgaggctgaggaagaattgcgtgaacctaggaggtggaggttgcagtgagccaagatcatgctgctgcactccagcctgggcaacagagtgagactccatctcaaaaataataaaaataaattaaa

SEQ ID NO: 747 - DNA, 2262 bp, Homo sapiens
atccctctgcagagcccggggtcaccaggaggagacgccatgacccccaccctcgcagccctgctctgcctagggctgagtctgggccccaggacccacgtgcaggcagggcccttccccaaacccaccctctgggctgagccaggctctgtgatcagctgggggagccccgtgaccatctggtgtcaggggagcctggaggcccaggagtaccgactggataaagagggaagcccagagccctgggacagaaataacccactggaacccaagaacaaggccagattctccatcccatccataacagagcaccatgcggggagataccgctgccactattacagctctgcaggctggtcagagcccagcgaccccctggagctggtgatgacaggagcctatagcaaacccaccctctcagccctgcccagccctgtggtggcctcaggggggaatatgaccctccaatgtggctcacagaagggatatcaccattttgttctgatgaaggaaggagaacaccagctcccccggaccctggactcacagcagctccacagtggggggttccaggccctgttccctgtgggccccgtgaaccccagccacaggcgtgtctaggaagccctccctcctgaccctgcagggccctgtcctggcccctgggcagagcctgaccctccagtgtggctctgatgtcggctacgacagatttgttctgtataaggagggggaacgtgacttcctccagcgccctggccagcagccccaggctgggctctcccaggccaacttcaccctgggccctgtgagcccctcccacgggggccagtacaggtgctatggtgcacacaacctctcctccgagtggtcggcccccagcgaccccctgaacatcctgatggcaggacagatctatgacaccgtctccctgtcagcacagccgggccccacagtggcctcaggagagaacgtgaccctgctgtgtcagtcatggtggcagtttgacactttccttctgaccaaagaaggggcagcccatcccccactgcgtctgagatcaatgtacggagctcataagtaccaggctgaattccccatgagtcctgtgacctcagcccacgcggggacctacaggtgctacggctcatacagctccaacccccacctgctgtctttccccagtgagcccctggaactcatggtctcaggacactctggaggctccagcctcccacccacagggccgccctccacacctgcctcacacgccaaggattacacagtggagaatctcatccgcatgggcatggcaggcttggtcctggtgttcctcgggattctgttatttgaggctcagcacagccagagaaacccccaagatgcagccgggaggtgaacagcggagaggacaatgcacccttcagcgtggtggagcctcagggacagatctgatgatcccagaaggctctggaggacaatctaggacctccagaggggggtgagatttcaggccacacactgtggaagcttgtatggcagtctcccaccctcatgtgttcaatctgatgatcccaggaggttctggaacaaaatctacagcctatgctttctggactatctgtcgatcattcctgaagagagggatcaatgttgagacggggtttcaccatgttgctctggctggtctcgaactcctgacctaaggtgatccaccagcgtcggctttccatagtgctgggattacaggtgtgagccactatgcctggccaacttttataatttctgtgctgggaacattccaaatcttcatttctcactcatgtggaaaatacaataatctgttgctaactatggtcaccctactgagctctcaggccctggaacttactccttctctccacctgtatttctgcacccgtccaccaacctctctccatccctgtcctccacactcccttgccagcctctgttgacaaccattctactctctgccatcacaaggcccacttttgtagcttccgcgtgagtgagaacatgctcctctttctgggcctggcttatttcactgaacataatgtcttccagattcatctgtgttgctgaacatggtacaatttccttctttttatgcctgaatattatttcattgtgtatatagaccacatgttccttatccattcatccattgatggacataggttgattccatatcttggctattgtgaatactgctgcaataaacatggcaatgcagacacc

SEQ ID NO: 748 - DNA, 3183 bp, Homo sapiens
gcgcaatcggctccagtgcgcctgcggaggcggtcctatgacggaaaactttattctcaagagatttctcattccgcagaaataaggatctggcatgtcaacacaaacataggaagttgaggcagtcaaagggaaataactgctaccctgactctgctgagagcctcacaagtccctgtgcacgccagcttgtttgccatgaataaccctataccttccaatttgaaatcagaagcaaaaaaggctgccaaaatattaagagaattcacagaaataacttccagaaatggacctgataagatcattcctgctcacgtaattgcgaaggctaaaggccttgcaattctgtctgtgatcaaagccgggttcctggtgactgccagaggaggcagcgggattgtagtggcgcgccttccagatggaaaatggtctgcaccctcagccattgggatagctggccttggtggaggatttgaaataggaattgagacacatttacagctacatattccctctgagcattgccctggctgccttccataagtgtgggttaccatctggtgtcatttccttactccaagacaactttgctcccacctgactcttttgtacggttattgtctagtatataatatttctatagttacagacttaaaatatagaaaaaatttatttttaaaccaattaagagaaaagagaagaactatgcatttatactattatttatggttagataattatctttactggtgattttttaaagtgtggatttaaattactctctagagtcacttgctttcagcctgaaggactttgtttagaatttataatatttcttgtaaaatggttctactagcaacaaattctctcaacttaaaaaaaaatttttaatctgggaatgtcttcatatccccttcatttttgaaatatacttttgctgattataagattctaagttgaccagttctttctttcagcattttgtcatcctactgttttctgaagtctactgtttttgaagagaaatctatctattattctaattggggttccttttatgtgatgagtcatttttctcttgctcctttccagattttctcttgcattttaagattttttacaattatctatccagagtgttatctttttacatttattctactcagaatttgttgagcttcttgagtgtagatccatgtttttcatcagattgagaattttcagccattatttctttgagaaaattttctgcttctttctctttttccttgccttctagtacttacatcacacatatgttggtgcacctaatggtgtcccaggtttcttgtgtttctgtcaatttttcttcattctctttctcttagtttttaagactttctattattcaaatttaccagttctttattttgcgtgctcagatctaccgttaaacttctctagtaaattgttcatgttgcttaatgtactttttacctccagaatttccatttggttcttttatataattttatgtttttatcaatattctctattcaataagatattctcattgtacgtttttctacttcttaaccatagttttctttaattctttgaacatatttatgacagctgttttaaagtctttgtctgctaaatctgatagctggaccatctgaacagcagtcattctcgtctgcttcctttttaaattttttttctatgtatgggtcacactctcccacttctttgtcttattatttttggttgagaatcagaaattttagatattatattgtatcaactctgggtgctcaacctctccccctaggagcctcttattgtttgcttgctgtttgtttagagatatggctggactgtttgaatgaattctgtgccccactactgtgaagcctccaatgttgtctatgggcatgcatatagttttcctgagatgacaggtgttctgactgtccctgtccgtgacctgtctgttaagctgtttgtctccattggtattacacactgttgttagcctccactaattgcctgctgattgctccattgtttccaacaatgccctggggacataaattgctccacagtttgatccagttaaaattgtgctcctgtgcacaggtagtctttgaggctcatttctatttcaggagggctcttcttagctatctctgtccctggttctccctgataattttctagaccaccaatggtttagcttgttgctgtcatggagctaaatacctcatcttacctgtttatcaccaaaagcatcatttttgacagcacctttgaacttccccaccctgtgttccaaaagctttcacttcccttggggagagctttggagctctctgctcttgcagcctgtctctctgtctgcccaagatctctgtgccgttgctccagagctggaggctggggcagtggctcccttctcttggagtgacatccctgcagccttgggtggtgtagtagcttggcttgcctctgtcagggtggagcttttgccccacaggtgaactggggcaagagtgagtggggtcctggtgctcctggactgttgtgctaggctggagccttcacttacacatgggttctgggtggaggaaggaagctccagacctctcagctgctcttgcctggaatggagcttctgtacaaggagctgtgggaagagaaatgctggcagaagcctctcctgtggatatactgcagccctgaccaggggctgggggaaggaagtctgtgttcttgcaaacccccttccccaagaggagcttccatcaggctgacctgcagcggggcacaggttatagctcaaatgtcaccaactctctcttccttaccaatatttaatagtgttcattgaatcaatgtgtcttcattttcttcacttgccatatgcccttaggacaatttccagaagtgttaatttttaaaataatttttaccagttacggttattttgctgtggagagggtctgtggcctctttatgccaccactgcagtgtcattctgatttgtagatacattctacagtgggatggagattcaactgtaattgttaagttttagctcttcttttgttagttatagaacagtgaacaaagtacttaatcttcctgaatcaaatctgtaaaataaaaaatttttaagttgaataaaatggtccttaaata

SEQ ID NO: 749 - DNA, 820 bp, Homo sapiens
gaagagaggcacagacacagataggagaagggcaccggctggagccacttgcaggactgagggtttttgcaacaaaaccctagcagcctgaagaactctaagccaggtttaattggtttctttttctcgtgggtagacttaataattttctacgtattctgacaaagaaataaccccgaagcacgttcctatttcccacctgcttgtagtttccgggataacctaaactccagagagctatagcatccactctgtcctttctgctttgcacacagatggggtggctggacgagagcagctcttggctcagcaaagaatgcacagtatgatcagctcaggtttccttccaaattctctacccacacaccttaagagattctgatacatcataaatagagggacatacatctttacatgaaaacgacatggaagattttctgagggacatgtgaatgggagacctgaggagaggcagagagtcagagactgactgctggtcagtgaagtcggaacaccacacacaacatttacagattaagttcgccgtcttatatgggtgtggttcgtggtgctccaaaacaattacactagtaacatcaaagatcactgattacagattaccctaacagatataataataatgaaaaaaaattgaactattgcaagaattacaaaaatttgatagagacataaagtgagcacatgctgctggaaaaatgacactgacacacttgctcaaagccgagttgccacaaaacatcaatttgtaagaggaaaaatatctacaaagcacaataaagcaaagcaaaataaaatgaga

SEQ ID NO: 750 - DNA, 2585 bp, Homo sapiens
ctttgtaatttgtagcaacaaacctggggtcagacactccactgcctgtgcatcttgcctgtttccggatccgccgtgtcacagacattttctatgtcagtgcctatggctctacccagggtgatgctgctgatctggtctgattcccaagctggaggtaatggcgtgtgtcctgccctagtgctgctccctgatggggagcatgctcagtttcctgcattcaggtacgagcagagacttggcaggatccgccccgttcagagttgcaggaagagccctggatgcctgtcgcaaattggaataagtgggagggagccacaggctggtacagagacaaggtattgctgtgttgtccaggctggtcacagactcctggctgcaagtgatcctcctgcctcagcctcctagagtgctgggattacagacgtgagctaccacacctggcttttcattccttttaatggctaaataatgttccattctatagatacatatttttttccccattcatcagttgaaggacatttgggttgttcctagtttttggctatggtgagtaatactgctatggatattcatgtacaggtttttgtgtgaacatatgttttcatttctcttgggtacatacctgggaatggaattgctggttcaaatggaaactctttaagtttttagtaactgccagactgcttcctaaagcagctgcaccattttacattcacaccagcagtgtatgaaggatccagtttcttcacgtcgtcaccagcacttgcctgtctttgtacaccaatcaaaggtgtatgaagtcgatctcattgtgtttttcatttgtatatccctgatggctaatgatgttgcccatctcttaatgtgtttatttggtcttttgtacatcatcttgtggaaaaatgtctgttaagatggtttgcccatttaaaaatagtgttatatgtcttttattattgagtaacagttctttatatgttgtggatacaagtcctttatcagatgtgtgattttaagtatgttctctcattctgtgggtcatctacacgttcttaaaaaattttttgagacagaggctttttaaacaaatttttttgagacagagtttacctcccaagctggagtccagtggtgagatttcggctcactacaaccaccacctcctgggtccaaatgatcttcccaccccagccttctgagtagtttggactacaggtacatgccaccacacctggctaatttttgtattttttgtagagatggggtcttgctgtgttgcccaggctaatatcgaatgcttgggctcaagctatctgtctgccttgggttcccaaagtactgggactacaggcgtgagctgctacacctagcctgcatcttcactttcttgatggtatcatttgcagcacaaaacttttatctattttttttcttttgtttgtggttttggtttatatttaaataggcttcacctgacccagggttttgaagatttacttttatatcttctaagagtttcatagttttaggttttacatttaggtatatggtccattttttttgtgtattgcataggaaagggtcccaacttcattcttttgcatgtggatgtgaagttttcccagcaccatttgttgaaaaggcgattctttttctgttaaattttcttggcacctgtgttgaaatcaaatatgcagaggtcttgacacactgttactgtccagtctctacacatgctgtccttctctcccacaaagtgtaataatgtaataatgcaataacgtgcctgataaccaaatgagtggatttcagcagtccccctttgtctgaaacctttgtgatcagagggaataaacatcttagaggcatgaagcccttgctcagataaggagaagatagagaaccaaagtgccataatgtaccaagtaaaaagcatcagatgtgccagaaaataagcagtaggaattaactttgagggttatcacaggaacactatgtagagtaagcacaagcagctcagctgtggacgagctttgctgtagattttgctgcaaacctctgcaggcctgagagcttgccgtgggtccagagagcagcagatgtacttggctgtgacgtcactggatgtgtcctgatctactccttctccttctcatacatgaggttatctgaggtctcagccaagagacaaatcagcactttacccacggacagcaccaaagctcgccatcttggccgctgccccagaaccttggaaacttctgcagtgaaatggattctgattatttttattacctttgttctttttttagaattgaagtctggaatacataaagtgtgttaatattaagtgcaacttcgtgaccttttaattgaggtattactgtgtaaccatcaccagattaatatatggaacatcataagtaccctgggagactccttgtgctatttcccactcagtgctctcctcttaaagaggtcagcactgttccggttcttctattaccatatatttgttttgcctgctcatgaacttcaaataaataaaaactatggtatgtaaaaaaaaaaaaaaaaaa

SEQ ID NO: 751 - DNA, 652 bp, Homo sapiens
acttattaatggtaaggcaggcttcggaaatgagaatcatgcaaataatgatttcattttttacccgtgtttttaagggactgagatatctttgtcatttacctgggatttacagggaccaaaaagctggacatcattcaccactgggaacagcatattgttcctggaagaggcaaaagcctagggcttcaagatgccggggctttaagaaaccaaggcatgacctcaagtgatttgccggaggtggcctcggtggcagcagtcattgaagaaaggaagacagctgcccagccagtctgacagaccatacacagacagccctgttcacagggaggcgtgggcaaagatttcatgacgaaacatcaaaagcaattgcaacaaaagcaaaaattgacaaatatgatttaattaaacaaaagagcttctgcacagcaaaagaaaccatcatcagagtgaacagacacaacctatagaacgggagaacacttttgcaatctatccatctgacaaaggtctaatatccagagtctacaaggaacttaaacaaatttacaagaaaaaaacaaactaccccattaaacagtgggcaaaaaacatgaacagacacttctcaaaagaagacatttatgcatccaaaaaaaaaaaaaaaaaa

SEQ ID NO: 752 - DNA, 916 bp, Homo sapiens
agagttcaaggtcttaatggctactctatgcggcctctcatagtcttttcaagggttttggagaagaataaaagatcagatgagtcaatggtgttactggaccctgtgaactgatgctgtgaagagaggccatttaacacggactacggggaatggtgccacagggggctcagtgctgcccttcactctcagcattttgctcactcagcattgatgacaggatgtcccaaaagtaacaaaagatgggagccagtcctctcatagctgtttcttcaatcatcccatcaacagctcttcatttattgaactaccttccttttccaaagaggtaatgctgagatcagtcagaaaggctttctgagaaaactggcttggatttctgggtctgttgcagtcaattcaagatgaactggcttgtatcaatgaagcgctcaatgcagttcacaaaacaggcctcagcccgactgtccaactttggcccaggcttgtccatgcacttctcccaacaaagttcagtcatctggtgcaccagctgctggaagcgctgcttttgagtctctacctcaatgaaaatgctgcaactgcgggtccactgcacccaaacccgccgcagaggaagagcaggaggaatccatcccaggacaaccatgcttgcagagacgaactccgcaccaaccttcacgtgtctccacgacctagttaatcaatttaaaatgaggtcactagggtgggccccaatccaatatgactgataactttataaaaaggagagatttggatacagaaagagacagagtgaaaaccatgtgaagaaacataggaaaagatggcagctacaagccaaggagaagcttgcagtgtgtattcatctgttctcatgctgttaataaagacatacctgagactgggtaattta

SEQ ID NO: 753 - DNA, 7868 bp, Homo sapiens
gggcgaggcggggggcgggcgccccttggcgcggtcccacttgggctacccttgcgcccacacctgggccggggccgcgcgacccagagaggggcggtgggagtggagcgcggccgcgtgcgcggggccggggtggcggggctgctcggacagggggcgccgctgtgcggatatggacgcgagcgcccccgcacgacgccggcccgaaaagagccgagggggaaggggcccgggatccgggtcgagcctgcccggccgtcccgactcgctcccgccctcgcggcctagctggagtctgggtgctgggcacggcctggacccttccctggggacatccgcccgggccgccgtggactggggtggccagggtgcggcctggatccccgcgtggcgagcagggcgagtgatgggagtgctgcccctcgcgcccacgttcctgggctggggtgggcggatagggcacccagcggccgcagccgcgagctcgtagggtgcactgaccccgttgggggctggggtgcccactccgcaagttatcactgagcgacttccggtctgtgagccccgtcctccgcaccccacctttccgccgcctagagcctccgcgccctcctgcgcccatcggaacttggcacaggttcaccccactttgtgtaggaactccagatccttccatggggtcctccttccagatactcaggaaccccacttcctgccagggtggagaggatggggtccttgaaggccagctgagggccctgacttcgagtcagaggtcaggggtcagcaagcagaagagtggattcgtgctgagtcattgcccatgggtgggttccgcgccctccctcccttgggcagacgtttggtaggcaaatgtgtgggcatgcaggccactggggtgctccatcttgggctcgggagtggctgcagccccgtccatagcccaggagacacgtacccatgaaaggagacgacgtgaggaatgaagcagttggaggtctgggcatcaccctgtgaggacgaggcatgtctgctgggagggctcctggccacgggggcttccactgtctggatggtccctgcccccattacacacagcctggagcctggacactgaaatccaaagggacagtgggggtcctttctagagtgtccccccagtgtcgggaagtaccctcaaacaacatcagcagggttgttccccctgccctgtatggtcagacaccgcccctacagacaggctggcaatggtgagtgggctcctcggcccagccagacaggcctacacctcacccccatgtggttggcctcgatctgcccctggcacaaccagagcggtgtgccctaaccagccccatatgtcaaccatgaggacggtgccccaacaaagaaatgttgggacagcttctcccaagccggttggcatctagggctgttgagtggcaccaggtatttcccatgtctcaactccatgtcacccccaggggcaccaggcaggacggctgcctcctgaccccaacattctcagccaagtggctccggctagcacccatgtagtccagctggccggcatccatcctgtcagcgcccaggggcacgctcctctgggcaccttcctagccagggccaacattcaggaacctgtgtgctaggcggggacaggtgtcctgcctccctccccaacccgaggagcagtgggatggactgagcagtccctagggctctccttccagggagaggtacccaggtagctcagtgaccctgtgtgcgtgggccctgggcgctccccatctgacacctttctggagaggccaggcccccgcagggaccctttggagaacagagtgggctgtggggcagccaagcatggatggtggtggcgagcccaggacctggaaaggtccctgctgccctggatgggggctggtggggacaggactctgagcaagtggagagccagatttgggcgatgtggagtgcaggccctgcagggccctgtgggcaccaaggggctgtggcccagggaggttttatctgagagggacagtgacaagaaagaggtcaaaggtaggccaagggaaggagggggtgctgggagacagggacggagtctagggatcagtgttccaggactgggcggtcatagaatgggctgtgggagcccaattgtgaaaccctgaggatggggaggaggtgtggcccgggactatgtgtggggcttaaggttgccattccaggaggagggtagtcacagccctgtttgctgcgctcaccttgggctaggcgtggtgtcatgtggaccctcagctgtgttgtgcagtagaggcccctggccccaacatggcccgtcgctctcagagctcctcgcagggggacaacccactggcacccgggtacctgccgcctcactacaaagagtactaccgcctggcggtggatgcactggccgagggtggctcggaggcctacagccgcttcctcgctaccgagggggcaccagacttcctgtgccctgaagagctggaacatgtgagccgacaccttcggcctccgcagtatgttacccgagagccacctgaaggcagccttctcgacgtggacatggatggctcctcgggtacatactggccagtgaactcagaccaggccgtgcctgagcttgatttgggctggcctctgaccttcggcttccagggcaccgaggtgaccaccttggtgcagccaccgccccccgacagccccagtatcaaggatgaggcccgcaggatgatccgttccgcccagcaggtggtggccgtggtgatggacatgttcactgatgtggacctgctcagcgaagtgctggaggccgcggcccgtcgggtcccagtctacatcctgctggatgagatgaacgcgcagcacttcctggacatggccgacaagtgccgtgtcaacctgcagcacgtggatttcctgcgcgtacggactgtggcgggccccacctactactgccgcactgggaagtccttcaagggccacgtcaaggagaagttcctgctggtggactgtgccgtggtgatgagtgggagctacagcttcatgtggtcctttgagaagatccaccgcagcctggcgcacgtgttccaaggagagctggtctccagcttcgacgaggagttccgcatcctcttcgcgcagtccgagccgcttgtgccctcggccgcggccctggcccgcatggacgcctatgccctggctccgtatgccggggccgggcctctcgtgggcgtccctggggtcggggcgccaacccccttctccttccctaaacgagcgcacctcctgttcccgccaccccgggaagagggcctgggcttcccctccttcctcgacccggaccgccacttcctgtcggccttccgccgggaggagccgccgcggatgccggggggcgcgctggaaccgcacgcggggctgcggccgctctcgcggcgcctggaggccgaggccgggccggctggggagctcgcgggcgcgcggggcttcttccaggcgcggcacctggagatggacgccttcaagcggcacagcttcgcgaccgagggcgcgggcgccgtggagaacttcgcggccgcgcggcaggtgtcgcggcagacgttcctcagccacggcgacgacttccgcttccagaccagccacttccaccgtgaccagctctaccagcagcagtaccagtgggacccgcagctcacgccggcgcgcccgcaaggcctgttcgagaagcttcgcgggggccgcgcgggtttcgcggacccggatgacttcaccctgggcgccgggccccgcttcccggagctcggacccgacgggcaccagcggctggactacgtgccgtccagcgcgtcccgcgaggtgcgccacggctcggaccccgccttcgcgcccggaccccgcggcctggagcccagcggagccccgcgccccaacctgacccagcgcttcccatgccaggccgcggcgaggccgggcccagaccccgctcccgaggcggagccggagcgcaggggcgggcccgaggggcgggcagggctgcggcgctggcgtttggcctcctacttgagcggctgccacggcgaggatgggggcgacgacggcctaccggcgcccatggaagcggaggcttacgaagacgacgtgctggctcccgggggccgggcacctgccggcgacctgctcccctcggccttccgcgtcccagcagccttccccaccaaggtcccggtgccaggcccgggcagcggcggcaacggcccagagcgcgagggcccggaggagcctggcctggccaagcaggactcattccgctcgcgcctgaaccccctggtccagcgcagctccaggctgcgctcctcgctcatcttcagcacgtcacaggccgagggcgcggccggggctgcggcggccactgagaaggtgcagctgctgcacaaggagcagacggtcagcgagacgctggggcccggcggagaggccgtgcgctccgcggcttccaccaaggtggcggagctgctggagaagtacaagggcccagcccgtgatcccggcggcggcgcgggcgccatcaccgttgccagccacagcaaggccgtcgtgtcccaggcgtggcgggaagaggtggcggccccaggtgccgtggggggcgagcgccgcagcctcgagagctgcctgctggacctgcgcgactcctttgcacagcagctgcaccaggaggcggagcggcagccgggagccgcgtcgctcaccgcggcgcagctgctcgacacactgggccggagcggctccgaccgcctgccttcccgcttcctctctgcccagagccactcaacgtccccgcaagggctggacagccctctgccgctggaagggtccggagcgcaccaggtgctccataatgagtcaaaagggagccccacctcggcttaccctgagcggaaggggagccccacgcctgggttttccactcgaagaggaagtccaactacaggatttatcgagcagaaggggagccccacctcagcctaccccgagcgcaggggtagtccggtgccccccgtgccggagcgcaggagcagtccggtgccccccgtgccggagcgcaggggcagcctcacccttaccatctccggggagtccccgaaggccgggcccgcggaggaggggccgagcggccccatggaagtcctgcgcaaaggctccttgcgtcttaggcagctgctgagccccaagggcgagcggcgcatggaggatgagggtggcttcccagtgccgcaggagaacggccaacccgagagcccgcggcgtctgtcactgggccagggtgacagcacggaggctgccacagaagagcggggtccgcgggcgcgcctgtcctcagccacggccaacgccttgtacagcagcaaccttcgggatgacacgaaggccattctggagcagatcagtgcccacggccagaagcaccgtgcggtccctgccccgagccccggcccgacccacaacagccccgagctaggccgtccaccggctgctggcgtcctggccccagatatgtccgacaaggacaagtgttcagccatcttccgctcggacagcttggggacccagggccggctgagccgcacgctgccagccagcgcggaggagcgcgatcggctgctgcgccgcatggagagcatgcgcaaggagaagcgcgtgtacagccgcttcgaggtcttctgcaagaaagaggaggccagcagccctggggcaggggaaggccccgcggaggagggcaccagggacagcaaggtgggcaagttcgtgcccaagatcctgggcacgttcaaaagcaagaagtgagtcttctggcctggcaacccaggccagggtgcccgcatcgctgccccggtcatccagaagccccgcggaacagagagccctgctcatctgcttgagcagcggctgtcaggccacggccgcttggggcttggctgagtgcgccagacctcggctccactggaggctcacctggcagctgccgtctctgccccctggcctccccaacgctggggctgcacccctcgccaccagtgcctttctcccctcagcaccttcatctctgcaccgtcagccttgcgtggcgcagcgtctggctccgccatctctttgtgcctcagtcccccccgccccctttatttttttgagacctagggctggagtgcagttgagcggtctgggctcactgcaacctctgcctcccgggttccagcgattctcctgcctcagcctcctgagtagctgggattacagatgtatgctaccacgcccaggtagtttttgtatttttagtagagacagggtttcactatgttggccaggctggtctccaactcctggcctcaaatgatcagcccgcttcagcctcccaaagtggggggattacaggcgtgagccttgcaccccgctaagtcccctatcctcttgcaagggtctcgcctctgtgcctcaattcctcattctctgggcccttctcctcctcagggcctcctgttctcagggcctcccccctccccgctccctccctctctcaaggtctcctccttccctcccccccccccccccccgtctcccccctcccccgcctgggcttcacttcctttcctacttggattctcctgctcgctgcctcccagcatcttttttggaggcccgtctcttgctgtggggaagactgggctggctgcgggcagtttgcaaggggtgggtggggcaggggggggggagctggaccagaagatgccccttggagtggcaaggaagctggacagggcaggcctctggggacgggacacagggaagcccgaaggggcgccttggccaggtctgccatctcctccagcgaggctctggccagcactgggtgagagtggggagggggcattggcctttgcagcacagtaaaacatggtccagacaacctgtggccccggcctcatgagcaccccctgcacaggcccggcccaagccaggcgctagaagggctggttgtggagtgcttatccttgacaggtatggggccaggtgagggcaggggacaaggtgcagctgaggccgagcccaactaggtcctgggcacccctgcaggtgggagtggtccttgtcctcctggtatccagcagacacccccctctccccaccagccccattctcaggtcctttcctctttgtcaccaacaccaagaatctgtccagggttcttggcttatcttttatctcttttcactcctagagaggaattgcaattgactcagaatgacacattttggcaccacgtgtgtagaaagcccccactgttagatgatagcctcgtgaaattcatgtttctgtattctcctatttcttttcaaaaactaattttttttttagtgtaataaatcctaagagggaactgatttaagaaacaaggccgccaaacaaaggcagcagttccgactccagcagctgggaaaggaaggaaagtgaccccactttcactcctgcacagcccactggttaccaaaaccaccgtgcaagtcgggatgacagcagggacttctggccaggtgggaaaggtgcctggaagcgggatgcgcctgtgcgtctcttggccatgatgttcttgtgggcatgttattcttggtgctgcctggggtgttgctgagcggacaggctctccagctggagtccatggagaggccagaggctggcggccctgcctgggccttcggagcctcctgcctgcaccctccacctcttctaaaccatgatgtggcacattttggtgttaataaaacacaacacacaaagta

SEQ ID NO: 754 - DNA, 6321 bp, Homo sapiens
gccgcaggcgtggggtggtgccgcgccgcgcgcccccaggtgcagacgccgcccccgagacctccggggcgggttctcggcgaccccgccagtggtgcaaagggcgccagccctccccgcctctgcgtctttgctcccggagcgcttgaaggagctgcggggaacaacaaatcatttaatcttcagagcatcttagactgaaaacctttcaactgtgctgaaaaacctagaagacagaccattttgcccaccctctcatttaaaaggaattgaagaagaaataaaatggcagaggtttaaggttactattcaggatgactgatgataattcagatgataaaatagaagatgaattgcaaaccttctttaccagtgataaagatggaaatacacatgcatacaacccgaaatcaccacctacacaaaactcttcagccagcagtgtgaactggaattctgccaacccagatgacatggtggttgattatgaaactgaccctgctgtagttactggtgaaaatatttctttaagccttcagggtgttgaagtatttggtcatgaaaagtcttctagtgatttcattagtaagcaggtgttagatatgcataaagattctatttgtcagtgtcctgcacttgtaggtactgagaagcccaaatatctgcaacacagttgtcattccctagaagcagttgagggccagagtgttgagccatctttgccttttgtgtggaagcctaatgacaatttgaactgtgcaggctactgtgatgccttggagctaaaccaaacatttgacatgacagtggataaagttaactgcacctttatatcacatcatgccatcggaaagagtcagtccttccatactgctggaagcctgccaccaactggtaggagaagtggaagtacatcttctttatcctattccacttggacatcttcccattctgataagacgcatgcaagagaaactacttatgatagagaaagctttgaaaaccctcaagtcacaccatcagaagcccaagacatgacttacacagcattttctgatgtggtgatgcaaagtgaggtttttgtttcagatattggaaatcagtgtgcatgttcttcaggaaaggtcaccagtgagtacacagatggatcacaacaaagactagttggagaaaaggagacacaagcactaacaccagtttctgatggcatggaagtccccaatgattctgcattacaagagttcttttgtttatcccatgatgaatccaatagcgaaccacattcacagagctcatacaggcacaaggaaatgggccaaaatctgagagagacagtgtcctattgtcttattgatgatgaatgccctttaatggtgccagcttttgataagagcgaagctcaagtgctgaacccagagcataaagtcactgagactgaagacacacaaatggtctccaaaggaaaggatttgggaacccaaaatcatacctcagaattgattctaagtagcccgccaggacaaaaggtgggctcgtcatttggactgacttgggatgcaaatgatatggtcattagcacagacaaaacgatgtgcatgtcaacaccagtcctagaacccacaaaagtaaccttttctgtttcaccgattgaagcgacggagaaatgtaagaaagtggagaagggtaatcgagggcttaaaaacataccagactcgaaggaggcacctgtgaacctgtgtaaacccagtttaggaaaatcaacaatcaaaacgaataccccaataggctgcaaagttagaaaaactgaaattataagttacccaagaccaaacttcaagaatgtcaaagcaaaagttatgtctagagcagtgttgcagcccaaagatgctgctttatcaaaggtcacgcccagacctcagcagaccagtgcctcatcaccctcatcagtgaattcaagacaacaaacagtcttgagcagaacaccgagatctgacttgaatgcagacaaaaaagcagaaattctaattaacaagacacataagcagcagtttaataaactcattactagccaggctgtgcatgttacaactcattctaaaaatgcttcacacagggttccaagaacaacatctgccgtgaaatcgaatcaggaagatgttgacaaagccagttcttctaactcagcatgcgagaccgggtccgtttctgcgttgtttcagaagatcaaaggcatactccctgttaaaatggaaagtgcagaatgtttggaaatgacctatgttcccaacattgataggattagccctgaaaagaagggtgaaaaagaaaatgggacatctatggaaaaacaagagctgaaacaagagattatgaatgagacttttgaatatggttctctgtttttgggctctgcttcaaaaacaacgaccacctcaggtaggaatatatccaagcctgactcctgcggtttgaggcaaatagctgctccaaaagccaaagtggggccccctgtttcctgtttgaggcggaacagtgacaatagaaatcccagtgctgatcgagccgtatctcctcagaggatcaggcgtgtgtccagttctggaaagcctacatccttgaaaactgcacagtcgtcatgggtgaatttgcctagaccacttcctaaatccaaagcatctttgaaaagtcctgcgctgcggaggacaggaagcaccccctcaatagccagcacccacagtgagctgagcacttacagcaacaattctggtaatgccgctgtcatcaaatatgaggagaaacctccaaaaccagcatttcagaatggttcctcaggatccttttatttgaagcctttggtatccagggctcatgttcacttgatgaaaactcctccaaaaggtccttcgagaaaaaatttatttacagctcttaatgcagttgaaaagagcaggcaaaagaatcctcgaagcttatgtatccagccacagacagctcccgatgcgctgccccctgagaaaacacttgaattgacgcaatataaaacaaaatgtgaaaaccaaagtggatttatcctgcagctcaagcagcttcttgcctgtggtaataccaagtttgaggcattgacagttgtgattcagcacctgctgtctgagcgggaggaagcactgaaacaacacaaaaccctatctcaagaacttgttaacctccggggagagctagcttgaccttcagttcacagaattcctggcactgatctgactaagcctagcagaacttctgatgagcaaaatatttctcttgctgaagagagggacagagttatttttgtaattgtgtgaattcctgttaaataatgttgtcatttttttttctgaagcacttttcatatgagaatagtgaaagtttcccctcttgataaacagtaaatccgttgtacttccaagggttggtttgtgagtagtgagtatgaagttgaaaggatgctgtccatgaaggcaacttggctgaaaaaggcacgttctatgctaatcttactatttggaggggggctgatggttcaccacctccccgctccacagggagccccacgtctcaacacctaccacccagccctgcagtttacatgtctcaacacccaccacccagccctgcagtttccaggtctcaacacccaccacccagccctccagtttccaggctacgctgttattttagttccattctctcctggaagcccttagggttcatggaacagacacgacactgcctttgctttgttttgcttttctcttttctgtttctttttcttttttttttgagacggaatcttgctctgtcaccagactggagtgcagtggtgcgatctcgactcactgcaacctccgcctcccgggttcaagcaattctcctgcctcagccttccgagtagctgggacaacaggagcacaccaccacacccagctaatttttgtatttttagtagagatggggtttcgccatgttggccaggagggtctccatctcttgaccttggcctcccaaagtactgggattataggtgtgagccaccgcacccagccgacactcccttttctacgtcaactcgtatcttggagtgatctgaccgctttggggttcttctctctgccctgggctcctcaacctagagaatcaacttcctgcttcagcttcagccagatctggagctgaccattctagggcttatttccttgccctttgcagttttctgtgtgtgttacagtctccaccaaaatatgcccaggtatgttgtatgaataatgcaaggtaacatccagagaagcaaattgtgttcacccaactctaggagaaactgcccttttttcttttggacaagaccacactgccaacctgatttgctggatttgaacactcttaattctcccaccttcaccacagcagaaatcaaacggcagtgaacgtggggtcaagactttgtctgggctgggtgtggtagctcacacctgtaatcccagcgctttgggaggctgaggtgggaggatcacttgaggccagcagtttgagaccagcttgagcaatatagcaagaccctgactctacaaaaaataatttaaaaatcagccaagcatggtggtgtgtgcctgttgtcccagctactctggagtgtgaggtgggaagattgcttgagcccaggagttcgagactgcagtgagctgtcattgtgctgctgccctccagtctggccaacagagcaagactctgtaaaagacttctctgcattcatcttcccttttccccttccagtgggaggtgaggccaaatccctgactaaccgtccagattcttaatacctagccaagacatcagtcctcactttattttaggctgtggaaatgaaggcctctttatggaaaagtaattttaagacagatggaaacttcagaatcccaaagacttgagagttctggtgaaacagttcaaggaaatcccagctgagagacagcccagctctcagactttgcaggctttctgccatgttacttaacttgacagcagcccttatgattacctaaatgaccaacccaacttgcttttgtccatgccttaaataacataattaacagagttagaagatcaggaaagaggcctttttgtgtgtgtttcagagttcattataacccagtggaagtggaggtgagcctacctagaggttcacatttcagcctctctccgaagacaaggcagcaatgagaatggaacactgtgcccattcgctctgcttcaatgaaggatgctctttttacattttagtggacagcacaattaagcaaccgcagttggggcccagggattcagcacctccagtgagtcaggtagcctgacaggaaatagctgtaacagtctgtgcccactgtcaccttcctatccttgataaggaagctgtcctggtgcactgcttctcctgcctcccgagtgttggtacagtgggtggcctatccagatccccagtcacccagtgctggcttcttagggaatgtgtcattgctgctgttgcagcaggcatacatctgatggtaaccgttctccgtttggagaagggttttggttctgtaagtggagggaagcgaaacctgtaaacacttgtgatgaagcggtccaggaagaacactctcaaggctgccagtgggattgttagtttcagcatgaaactaactttgacattgacatagcaaagttgggaacccagttttaaattttgaggcagtaaagtggttaggctgatgttgtcacactgtccggggccacatttgtggtaactgagtgacttaggacaagtcactttgtatctcttctgtcccaatttcatcctcggtaaaaatggcgatgctaattgtctgccccaagggtgggtgtgaggattacatgaggtaatgcattgtaaagcatctagcaccaagtgttaactgctattaaataataggtattaggatgtatgcagcttgacagctgtgtagtaattaaccacactggctgttttgtgagggcatcatctatgctacagaaaggaataatcattagactaaatattcctagaaatcccaaacgacaggctcttcaaactcaagtggaaatgagacctcatcagagtattctcctgatccagtagagtgtggtgtgtggagtcaaagcctaggtttttgtccatccactcctagttggatgttacctaacttctttgagtatggttttttcgctggtgatatgaaatcagtatgtattttgctgcgttattgtggagcttgaataaaatagtaatgcata

SEQ ID NO: 755 - DNA, 4877 bp, Homo sapiens
agttggcagcttcacctcagagctgcaggaaggaacggggcagtgaaaatcgaatcgggtgtgatcctaggccaagctcatggcccagcagggccagcaggggcagatggcaagtggagacagcaatctcaacttcaggatggtcgcagagatccagaacgtagagggtcagaacctgcaggagcaggtttgccctgagcccattttcaggttcttcagagaaaacaaggtggagattgcaagtgcaataacaaggccatttcctttccttatgggcctccgagaccgctccttcatctccgagcagatgtatgaacattttcaagaagcttttagaaacctggtcccagtgacaagagtgatgtattgtgtactcagtgaactggagaagacatttggctggtcacatctggaagcattgttcagcaggattaacctgatggcctatcctgatttaaacgagatttacagaagcttccagaatgtatgctatgaacactcacctctccaaatgaataatgtaaacgatttagaagatagacccagattactaccatatggtaaacaagagaacagcaatgcctgtcatgaaatggatgatatagcagtgcctcaggaagccttgagctcctcgccaaggtgtgagccaggtttctcttcagagtcttgtgagcagttagctctcccaaaggctggtggaggagatgctgaagatgcacccagcctactaccaggtgggggagtgtcctgtaaacttgctatacaaatagatgaaggagaatcagaagaaatgcccaagttactgccttatgatacagaagttctagaaagcaacgggatgatagatgcggcaaggacatacagcacagcaccaggggagaaacagggagaggaggaaggcaggaacagtcccagaaaaagaaaccaagacaaggagaagtaccaagagagtccagagggaagagacaaagagacctttgatctaaaaactccccaagtcactaatgaaggagaaccagagaaggggctctgtctactaccaggtgaaggagaagagggcagtgatgactgttcagaaatgtgtgatggagaagagccccaggaagcctctagctccctagcaagatgtgggtcagtttcttgtttatctgcagagacctttgatctaaagactccccaagtcactaatgaaggagaaccagagaaggagctcagtctactaccaggtgaaggagaagagggcagtgatgactgttcggaaatgtgtgatggagaagagcgccaggaagcctctagctccctagcaagacgtgggtcagtgtctagtgaactagaaaatcacccaatgaatgaagaaggagaatcagaagagcttgcttctagcctgctatatgataatgtaccaggagcggagcaatcagcatatgaaaatgagaagtgttcctgtgtcatgtgtttctcagaagaggtgccaggaagcccagaagcaaggacggaaagtgatcaagcgtgtggcacaatggatactgtggatattgcaaacaactccactttgggaaaacccaagaggaaaagaagaaaaaagagggggcatggctggagcagaatgagaatgagaaggcaggaaaacagccaacaaaatgataatagcaaagccgacggccaggtggtctccagtgaaaagaaggcgaacgtgaatctgaaagacctttccaagattagggggagaaagagaggcaaacctggaacccgcttcactcagagtgacagagctgcacagaaaagagtccgatcaagagcttcaagaaagcacaaagatgaaactgtggattttaaggctcctttgcttccagtgacctgtggtggggtgaagggaattttacataagaagaaattgcagcaaggaatcttggtgaagtgtatacagactgaggatggaaaatggttcacccccacggaatttgaaatcaaaggaggccatgcaagatcaaagaactggaggctgagtgtgcgctgtggcgggtggcccctacgatggctgatggagaatggatttctgcctgatcctccaagaatacgttacaggaaaaaaaagagaatactgaagtctcaaaacaatagctcagttgacccttgtatgagaaacctggatgagtgtgaggtgtgccgggacggaggggagctgttctgttgcgacacttgttcaagagtcttccatgaggactgtcacatcccgcctgtggaagctgagaggaccccgtggaattgcatcttctgcaggatgaaggagtctccgggaagccaacagtgttgtcaggaatctgaggtcctggagaggcagatgtgtcctgaggaacagttgaaatgtgagttcctcctcttgaaagtctattgctgttctgagagctccttttttgccaagattccatactattattatattagagaggcgtgtcaaggcctgaaggagcccatgtggttggataaaatcaagaaaaggctgaatgagcacggttacccccaagtggaggggtttgtacaagacatgcgcctcatcttccagaaccacagggcctcttacaagaaggaagactgtgtagagaccgctcaggacaatgcaagtgaacagtcatgggcagggcggcaaagtgaagagagcgtttatcctccgaaggagctgtaggactggccagcgtgcatcagcaggagcaaggagattgtgtctgggagtggatcctggtccaggaagggtgaaatgtgaaaccagatacgtgagaattattgacaaaagggcaagcttcgctaccacagagtttaactagcctggcatgggccaaaggtgatgattctgatatactcctgggtggctcctagagacttagtataagccatggtacacattaaatcaagtggaagcagagataccagaactactgtggcagagtctggaaaagtgggtcccaaggatagagaagttggtgtgctagaatgactctgcactctacaactggagaatccatccatcaggtgactgagttcctcctaaggggaacactactaatgtgtctcagacactaactaaagggagaaggaatgcactgctgagggggcagcacatccttgagaagctcaatggtggctgccccctgcaagctggaataatgctagggatgttttatagaactggatcccccagtagtgagtaaaatgaaagagttccagcataacagaggccaagaggcagcatttaactgtgagggcaagataaagtaatttccctaaggggcatgaatgttagagtgacagctggaaggcctggcctgtaggtatctatgaagacagacatgcatggatatgctgttcctataggcaagatagatgggcagctgacaaggatattgctttagacatataatcaaaaaagattggacatcaatgagcagaatgctgaggtcagctctctaaaggtgaagtctagaccccttgcccagcttccaaacctcagccagttctcaatggaatccagaacccatgatggaaatgagggcagtttctcataaggaagaaccttgtaaatgtgcacatcactgattccctcaagttttcacgggagggctctatggccatttattcaagtaactcacatgccggggaaaggaaaatacacagatctttcaagggatgttgagtacaatgtcagagttgatgctaatccctggggactcaaagccctatcatagcccctgttagagtatgtggagatcaggtaatgtccatctcacaatgggccctctggatccacagagccacccagcaatcgtttcccctcttcctgaatgtataatcaggatatacattcatgcatacatcataatacgtagcaattggctgacccggttccttaacctgggctttcctaaactatgaaataacaatgactgtcttagggaaggccaagcagaagcctctgaaactgaggtttcatggtgaaaacaagtaagttaaaagcaatatcacattcttggggagtgatagagattagtgccacctacaaagacctgaaggaggcaggggttgttaccccagttacacctccattttaattcagcagtctgccctctggtatctcctggtggttcatgctgctaaatggctcctaaaacttaaccaaggagtagccccaattatagttgctgtgtcaaatatggtatctttattataatgggttagcacagccttagcaagtgatatgcaactattaatatggaaatgccacttttaaaggattcagcaggatgtaggttgagaagcaattcacattctcaaggattggacaacagtatatccttacggtcttgctccagggcaatgtgaatcctgctccgtgttacaatatagcctttctggaaactctggaatacattacattcgtccactggattgatgacagtatgttcatgggcctgataagtgagaaatatagactattctgaatgacttactaaatcacaaacactgcaggtggtgggagagaaacgttacaaagattcagagatatgccatataggtaagctgtcaggggttcaatggtctggagcatgtcagtgtatcccctccaaagctccaagctattgcagctcatacctcctaccacgaagaaactcagagcttgatgggcctcctcaggttaggagaatcaccatggttgacattctgatgaatgtgattctaggctttgtaacgtgtgtgtgtttgggagacagggagtagggaggcagtgggtataccatcttaataaataaaaaatgcttatcaacttttttcacttaataacatacaatggacattgtcacatcaataaatacagctctacatca

SEQ ID NO: 756 - DNA, 5056 bp, Homo sapiens
gagctgaattctgcgtcttcctttaggctgcggcgagacaatccccagagccccgcggcccggcctcggggcagccatggactcgcaggaattgaagactttgattaattactattgtcaagagagatatttccatcatgtattactggttgccagtgaaggaattaagaggtatggaagtgatccagtcttcaggttttatcatgcctatggcacattaatggaaggtaaaactcaagaagctcttcgagaatttgaggctattaaaaataaacaagatgtatcactttgttctctacttgcactgatatatgcccataaaatgagtcctaatccagatagagaagctattctggaatcagatgccagagtgaaggaacaacgtaaaggagctggagagaaagccttataccatgcaggcttatttttatggcacattggtcgccatgataaagcaagggaatatattgacagaatgatcaaaatatcagatggtagtaaacagggacacgttttgaaagcatggcttgatattacaagaggaaaagagccttacactaaaaaagcactgaagtattttgaagagggactccaagatgggaatgatacttttgctctgctgggtaaggcacaatgccttgagatgcgccagaattattcaggtgccctggagactgtgaaccagataatcgtgaattttccgagcttccttcctgcttttgttaagaaaatgaaattacaactagccttgcaggattgggaccagacagttgagacagcacaaaggttgctgctccaagatagccaaaatgtggaagcactgagaatgcaggcactctactatgtgtgtagagagggggatatagagaaggcttccaccaagctggaaaacttgggaaatacattggatgccatggaaccacagaatgctcaacttttctataacattacactcgccttcagcagaacttgtggacgtagtcaacttattcttcaaaaaattcaaacgttacttgagagagcttttagtttaaaccctcagcaatcagaatttgctacagaacttggataccaaatgattttacaaggaagagttaaagaggcactgaagtggtataagaccgccatgacacttgatgagactagtgtgtctgccctagttggatttatccaatgtcagttgatagaagggcaattacaggatgcagatcagcagctagaatttttaaatgaaatccagcaatccattggaaaatctgcggaattaatctatttacatgcagttcttgccatgaagaaaaataaacgacaagaagaagttattaatttgttaaatgatgtcctggacactcacttttcacaattagaaggtttgcctcttggcatacagtattttgaaaagctaaatcctgatttcttgttagaaattgttatggagtatctgagcttctgtccaatgcagcctgcaagtcctgggcaacctctttgtccacttctcaggcgttgcatctcagtcctggagactgtagtaagaactgttccaggtcttctgcaaacagtcttcctaatagcaaaagtgaaatatttgtcaggtgatattgaagcagctttcaataaccttcagcactgcttagaacacaatccctcttatgctgatgctcatctgctgctagctcaggtttacttgtctcaagaaaaagtcaaattgtgttctcagtctcttgaactttgtctgagctatgattttaaggtgagagactatcctttataccatttgataaaagctcagtcacaaaagaaaatgggagaaatagcagacgcaattaaaacactgcatatggcaatgagtttaccaggaatgaaaagaattggagcttccacaaaatcaaaagacagaaaaactgaagttgatacaagccatcgtttatcgatctttcttgaattgatagacgttcaccgcttaaatggagagcagcatgaggcaaccaaagttttacaagatgccatccatgaattttctggaacatctgaagaagtgcgggttaccattgctaatgcagaccttgctctagcccaaggagatattgaacgggctttaagcatccttcagaatgttacagccgaacagccttattttatagaggccagagaaaaaatggcagatatttatctgaagcacagaaaagataaaatgttatatatcacttgttttagagaaattgctgaaagaatggctaaccctcggtcttttcttctccttggtgatgcatacatgaatattctagagcctgaagaagccatagtagcatatgagcaagcattaaatcagaacccgaaagatggaacattggcaagcaaaatgggcaaagcacttatcaaaactcataactactcaatggcaatcacttactatgaagctgctctgaaaactggacaaaagaattatctttgctatgacctggctgagctcttattaaaattgaaatggtatgacaaagcagaaaaagttcttcagcatgctctggctcatgaacctgtaaatgaactgtcagctctcatggaggatggacgttgtcaagttcttctagcaaaagtttatagtaaaatggaaaaacttggtgatgcgatcactgcattacaacaggctcgagaattacaagctcgggtactaaaacgtgttcagatggaacagccagatgcagttcctgcacagaaacatttagcagctgaaatttgtgcagagattgcaaaacattctgttgctcagcgagactatgaaaaagcaattaagttttatagagaggctctggttcactgcgaaacagataataagattatgttggaactggcacgattatacctggcacaagatgaccctgattcctgcctgcggcagtgtgctctactgcttcagagtgaccaggataacgaagctgctaccatgatgatggctgatctcatgttcagaaaacaagactatgaacaagcagtgtttcatttacagcagcttttagaacgtaagccagactcctcgagttcagggatcacaccatattcccaatatcagacaaaatgccacacacatggatgtggcaacatagatgtttattggttgaatggatcagtgaatgactgtaaaacaccaagtcaattaaaaacacagcaggagaatcgcttgaacctgggaggtggaggttgccgtgagccaagatcacaccactgcactccagcctcggtgacagagtgagacttggtctcaaaaacaaccacaaaattttaagtaaatttttattgtctatgtgatatttttaatcttaagagtttttaatcttgtgttgtatgctttattcttactagtaccttacatacttatccacagatctattttgttggaattactctaaaacatgcatctccgttcattttatgtgtacattattggttatcctcagtaactcatcttgtactttagattaaggctctattttagcttatttcagaaatgtaccatacaaatttgacctaatttaagtagttgaaaaattcctcttctagatctaattactgctctcacgacagattgccccttttctctctcagaatctccagatcgccttgagctttccccttccttcatactaattggttaacatgtctcctcagctctgtttgcttgatagctagctaacacatccagtctgtcgtatcctaacccactgctctaatgaagacccttatcacctctcatctgaactagtgcagattcccaactcatcttccagcttctaggttctggctgctccaggtcatcataggactagcatatcagttctaaaaatcaaaacctaccctttgcttaaaatttaagttagtgcttcaggataaagtctaaaatcatagcattattttaataataatatggccgcaaattatttggccatttatatttcttatccttcttcctccgctttaataatatcaaagttaccaacactccccacactgttctctgcttccctcttggcgcatgccttctgctacttggaatgcctttgtccgtctagtaagatcttcctcctatccttgaggctgctcaaaggtcaactcctatgtgaaatttcccaactcctccaggcaaagttaagaatcctgtgctttgtaataccataccatagcactgcatgcttgccacatctcatcaccctataactattttgatatcttcctactattcatcaataaagatggaccagctaagttttttagaaggtaatatacattttagtttttaatacatttcttaagtgcagaaatttgccttctgtcaaatgtcatggttaaccaaagacaagtgaatgtaatttaatctgtcactggtaattataacttgaactaataatgaatacatttcaatagtatataagaaatattcaagaaattgccttcccaatgttgataatactagcagtatcatgcaaaaaaaatttaatccgaaattttaacctttagttcttgcttaatccaatatagcttccagatgctgtggctttattatggggtagttactctatttcttgtcaacatttttggaagtataaatattattaataacatttgtaatttataaatatttttcatgcctttatttctgtagcactcctacagtcaatattataatcctattttaagaaaataagtatattggactcaaagaatttgagtaatttgattgaattcacatagctaaaggacaagaccaatatttgaattgtctttttctgaaaccatattcttattgtgccctttttagtgatgctaaaaggtgtggtgaacaaaatctctggacccaagattgtgtgtcaaggggacaaatgatactatcagcctgtattagtttgacatcctgtaattaagtagatacagtatttccaaaagtcttttttaaagaatattttgtattgtggtgaaacatatataacacaaaattcatcatcttaaccatttttaagtgtactgttcagtggcattaaatgcattcgcattgttgtgtaagtca

SEQ ID NO: 757 - DNA, 4338 bp, Homo sapiens
ttcttagtgttgtatgtgttttaactcttttaatcctcacagtggccttctgaggtaagtactgttattatcattcccatgaggctgagaagactgaagaagtacggtaacttactaaggctgcagagccagcaggtgacagggccgggatttgaacccagaccctctggtgtaggagccgtggcctgcgtgctcaatcacaacaccattctgcctgtaccagaagcactgccgattttcaggacagcgtgtgggtttgcacttttctgaaatcttgctgctctgtttatcttggccagcagaagattcatggcttcttgaggtagataaggaagcaggaagaacaaagtactggcaatgtcatttcctaaaatatgcccctgtagggaaagataagtttttgttctctgaaagcagaaggaactggttagaacaaagtgccagcccttttcagagagatgaagtgtcagagttggataaatgagtggttttggaagacgtgtttatatcgtcttttccttggagattcgtgcagatgcccatgtccgaggttatgttggagaaaagatcaagttgaaatgcactttcaagtcaacttcagatgtcactgacaaacttactatagactggacatatcgccctcccagcagcagccacacagtatcaatatttcattatcagtctttccagtacccaaccacagcaggcacatttcgggatcggatttcctgggttggaaatgtatacaaaggggatgcatctataagtataagcaaccctaccataaaggacaatgggacattcagctgtgctgtgaagaatcccccagatgtgcatcataatattcccatgacagagctaacagtcacagaaaggggttttggcaccatgctttcctctgtggcccttctttccatccttgtctttgtgccctcagccgtggtggttgctctgctgctggtgagaatggggaggaaggctgctgggctgaagaagaggagcaggtctggctataagaagtcatctattgaggtttccgatgacactgatcaggaggaggaagaggcgtgtatggcgaggctttgtgtccgttgcgctgagtgcctggattcagactatgaagagacatattgatgaaagtctgtatgacacaagaagagtcacctaaagacaggaaacatcccattccactggcagctaaagcctgtcagagaaagtggagctggcctggaccatagcgatggacaatcctggagatcatcagtaaagactttaggaaccacttatttattgaataaatgttcttgttgtatttataaactgttcaggaactctcataagagactcatgacttcccctttcaatgaattatgctgtaattgaatgaagaaattcttttcctgagcaaaaagatactttttgattcatctttgctctggaatgtattacatgttttcttccaactgtttgaaggagaattttgaatgtttgccacaccgctgatacccaaataattttttaaatgaagtggagcttgtggcttcctgatgtgtcaccagacaaaatattcgcttgggatatgtattctttgttttttgctccatgtacactttcagctgtgagttagtatagggcgtatacttaccggtttaatgacctcaacctcagttgtgtttggataacttagggtgtatacccttagtttccttagagttggtaggatcaagtcattggtttgctttgactgggtttttaaagtattaagtacagtgtcatcaatttacagttaaggaaaggaatcgtgaagtagaaaaattattttctttagtcttgctggtacaatttgggctaaggagtctttgttattttctgtcttgcttttttttttttttttttttttttgaggcagagtctcactctgtcgccaggctggagtgcagtggtgtgatcttggctcactgcaacctctgcctcctgggttcaagcgattcttgtgcctcagcctctcgagtagctgggattacaggcatgcgccaccacacccagctaatttttgtgtttttagtagagacggggtttcaccattttggccaggatggtctcaatcccctgacctcgtgatccacctgcctcggcctcccaaagtgttgggattacaggcatgagccactgtgcttggcctgttattttattttcttataactacaacttttcttcttgaattttcaggtcagaggcaagaaaaactctttacaggtttttagtggggggcttatggagtatttcaggagttctttgcaaattaaatcatcttttcacttgtattgtttttcaaaactttgttgatttctaaaatgtgccaactgtgagtaaactatggtatttgcaagtggtttttacataatatttgagatgaggaagtgagattgtgcatgacatacttctcctttgtattctctcagtgccttacagcaggttactccattctgctatgacaacttgtttcaaatgttaatttacataggattttttataagccattaaggcatatgtatagtatatcagtaaagatggatggtgcatatataaatagtcttctgtaatagtgattggatttacttctcaattatgagagacaaaaattatcccctcacctgtctctattctttcaacaggttgatcccttttcatgatttttcattaggtggttcaggaagtttccatattacagcgcttcagactgtatatgttagtttaaaaatcacttttctctctctcaacttctttcttttttttttgaagacttaatttaaaaaatttgggttgttagatccgtatcatagatttggcctagcctcttctgttaacctagtccacagatgagcgaatctggttagttgaaggacattgtgatttgactctggtcacgcgaggaagtagaagggcaaagacaggaccggcagtttacatttccagtggttaaacctcacggtactttgggactgcttgttaacttttgtggttgtctgaggccaatctaacgtgaccatttctgacacctcaacagagagaggaaagcaacttgagcaatgagagtaaataacttgggctctcagagatttgaagatagagatctcattgtgagggggactattttgcaggtcctcatttctccaagaaagagatggtgttacaggaacccactgaaagccatatcccattaaatgaggaactaattttggctgggccttcttgtaatgtcctcgcaggtgtgttgtgaagattaatgcagggtagtatgtttgtagattgacacctagtctaaacttgaggtaattggtgctctgtgaatactcagtcgtgttcttttatagccttaatcatgatttgaactagtcccttgctttttaaatgactgaatgaagtccttcgtggtaagggagtacgttgataacttagtttactatatgggtttgtggtcgcatcccagtcatcagctgctatcattttccttcttcatcccttatactgagatttgggttacagctttttattcttcgaaggatcacaaagcagtgtacagacacctgccttctttaaggatgaaaggaagataaagtggtctttttttgtttacttatttgtttcacctcttgtttgagtaacttctaaggtgctattctctctctctttttgctacctcatgagctcttgtcacagccatggaaaccagcctcgtttagaaagggaacttagttcagaaggggttaaaagccttccagaatttttctttagctgctgaagtttttacatgtggttacatgactttaagttttatgcattacgctcttaattctattacaaaatgtggactcaccaattgctttgtgttttccatgtgacctgttacttcaggctacttggggaacatcttagtcctctgtagctcctgaacccagcactggtgcttcaagagagaaggtagcacgtctttgttcaaaacaaaacaaaacgacacttctggaggccacatcctgaatatgaatgttctactaagtcactcagttatggttctaaagggaaactgtaagaagacccacaaggagtggaccaagactattatttaattgcacaacttgaaactttgctgccagaagaggcagctccattcctttgactccagtgttgggctgttaactgctgcacctcattgcctttttttgtttttgtttttgttttgtaggagggtaggcactgttgggccatatgcacaaatattgtaactcttggtatctttactgcatcatagtcaataaacttctttgtaccctttggcta

SEQ ID NO: 758 - DNA, 2560 bp, Homo sapiens
taaatgtgtttgtgtggctgtttgatctcaaagcaatgctcagaagatgcagtgtctcgaaatcccagaagataagatgttaccacatgaaagatggtctcaataaagggggagaggcggtggccgaggccttaatttccaaaacgagaaactggggcccacccatcttttaaaggtcgtcaaaagaaagctcccatcctcccatcccccacacctgtgtgttgactctgtaaagatgcagtttcctcactttgggaggagaggccgtggtttttgcaggaattgcgccgctgccgaattcagccattgcctcttggaggtttaggatgccccaggccttgttttccctcaaagcattccattggcaatcacgaccaaccatgctccttgaggatttctgtacacactggcttttcctggtcttgtaaaatgtcggttccaggaccttaccaggcggccactgggccttcctcagcaccatccgcacctccatcctatgaagagacagtggctgttaacagttattaccccacacctccagctcccatgcctgggccaactacggggcttgtgacggggcctgatgggaagggcatgaatcctccttcgtattatacccagccagcgcccatccccaataacaatccaattaccgtgcagacggtctacgtgcagcaccccatcacctttttggaccgccctatccaaatgtgttgtccttcctgcaacaagatgatcgtgagtcagctgtcctataacgccggtgctctgacctggctgtcctgcgggagcctgtgcctgctggggtgcatagcgggctgctgcttcatccccttctgcgtggatgccctgcaggacgtggaccattactgtcccaactgcagagctctcctgggcacctacaagcgtttgtaggactcagccagacgtggagggagccgggtgccgcaggaagtcctttccacctctcatccagcttcacgcctggtggaggttctgccctggtggtctcacctctccagggggcccaccttcatgtcttcttttggggggaatacgtcgcaaaactaacaaatctccaaaccccagaaattgctgcttggagtcgtgcataggacttgcaaagacattccccttgagtgtcagttccacggtttcctgcctccctgagaccctgagtcctgccatctaactgtgatcattgccctatccgaatatcttcctgtgatctgccatcagtggctcttttttcctgcttccatgggcctttctggtggcagtctcaaactgagaagccacagttgccttatttttgaggctgttctgcccagagctcggctgaaccagcctttagtgcctaccattatcttatccgtctcttcccgtccctgatgacaaagatcttgccttacagactttacaggcttggctttgagattctgtaactgcagacttcattagcacacagattcactttaatttcttaattttttttttaaatacaaggagggggctattaacacccagtacagacatatccacaaggtcgtaaatgcatgctagaaaaatagggctggatcttatcactgccctgtctccccttgtttctctgtgccagatcttcagtgcccctttccatacagggatttttttctcatagagtaattatatgaacagtttttatgacctccttttggtctgaaatacttttgaacagaatttcttttttttaaaaaaaaacagagatggggtcttactatgttgcccaggctggtgtcgaactcctgggctcaagcgatccttctgccttggcctcccgaagtgctgggattgcaggcataagctaccatgctgggcctgaacataatttcaagaggaggatttataaaaccattttctgtaatcaaatgattggtgtcattttcccatttgccaatgtagtctcacttaaaaaaaaaaaaaagaaaaagaaatggataatttcatctactgcctttacttggggttaatgtgattcttaaacaccttcatcatggaactctcagagtggggtccgttttggtttcctggtggtgggttttgaaagataagggaaagcacattttgagcatgtctgggtaccatggtgcggatgcttgggaaccagaactgtttcagaggaatctaaagtctgattttagttttcagagacacagcttgttgtaaaacatgagaagacatgatttctaggactcaagcagcaagccaggattctaggttggctgctgtgtcatctttgaagtcaagacaaagctgggctcgaccttcaagggtcctcgttttgataatacttcagaatagggaactcatgtgaatactactatgtagaaataaaacctagaccttgagcgaacatctgtatattggttgaaaacgatagtggtaaccattgatcccccttcatttgatgtttggaaaattccagtaattatcatttttgcaacgaatatggataccacatagtactttggtgttacctgcttttgaaaaataaagtctttggttcacccggtgaactatt

SEQ ID NO: 759 - DNA, 7065 bp, Homo sapiens
ggcttcagacccgccgggctcccgccgcgcgcgctgtccctggagctcggggacgcggcccggagccgggaagatggcgaagcggctctgcgcggggagcgcactgtgtgttcgcggcccccggggccccgcgccgctgctgctggtcgggctggcgctgctgggcgcggcgcgggcgcgggaggaggcgggcggcggcttcagcctgcacccgccctacttcaacctggccgagggcgcccgcatcgccgcctccgcgacctgcggagaggaggccccggcgcgcggctccccgcgccccaccgaggacctttactgcaagctggtagggggccccgtggccggcggcgaccccaaccagaccatccggggccagtactgtgacatctgcacggctgccaacagcaacaaggcacaccccgcgagcaatgccatcgatggcacggagcgctggtggcagagtccaccgctgtcccgcggcctggagtacaacgaggtcaacgtcaccctggacctgggccaggtcttccacgtggcctacgtcctcatcaagtttgccaactcaccccggccggacctctgggtgctggagcggtccatggacttcggccgcacctaccagccctggcagttctttgcctcctccaagagggactgtctggagcggttcgggccacagacgctggagcgcatcacacgggacgacgcggccatctgcaccaccgagtactcacgcatcgtgcccctggagaacggagagatcgtggtgtccctggtgaacggacgtccgggcgccatgaatttctcctactcgccgctgctacgtgagttcaccaaggccaccaacgtccgcctgcgcttcctgcgtaccaacacgctgctgggccatctcatggggaaggcgctgcgggaccccacggtcacccgccggtattattacagcatcaaggatatcagcatcggaggccgctgtgtctgccacggccacgcggatgcctgcgatgccaaagaccccacggacccgttcaggctgcagtgcacctgccagcacaacacctgcgggggcacctgcgaccgctgctgccccggcttcaatcagcagccgtggaagcctgcgactgccaacagtgccaacgagtgccagtcctgtaactgctacggccatgccaccgactgttactacgaccctgaggtggaccggcgccgcgccagccagagcctggatggcacctatcagggtgggggtgtctgtatcgactgccagcaccacaccaccggcgtcaactgtgagcgctgcctgcccggcttctaccgctctcccaaccaccctctcgactcgccccacgtctgccgccgctgcaactgcgagtccgacttcacggatggcacctgcgaggacctgacgggtcgatgctactgccggcccaacttctctggggagcggtgtgacgtgtgtgccgagggcttcacgggcttcccaagctgctacccgacgccctcgtcctccaatgacaccagggagcaggtgctgccagccggccagattgtgaattgtgactgcagcgcggcagggacccagggcaacgcctgccggaaggacccaagggtgggacgctgtctgtgcaaacccaacttccaaggcacccattgtgagctctgcgcgccagggttctacggccccggctgccagccctgccagtgttccagccctggagtggccgatgaccgctgtgaccctgacacaggccagtgcaggtgccgagtgggcttcgagggggccacatgtgatcgctgtgcccccggctactttcacttccctctctgccagttgtgtggctgcagccctgcaggaaccttgcccgagggctgcgatgaggccggccgctgcctatgccagcctgagtttgctggacctcattgtgaccggtgccgccctggctaccatggtttccccaactgccaagcatgcacctgcgaccctcggggagccctggaccagctctgtggggcgggaggtttgtgccgctgccgccccggctacacaggcactgcctgccaggaatgcagccccggctttcacggcttccccagctgtgtcccctgccactgctctgctgaaggctccctgcacgcagcctgtgacccccggagtgggcagtgcagctgccggccccgtgtgacggggctgcggtgtgacacatgtgtgcccggtgcctacaacttcccctactgcgaagctggctcttgccaccctgccggtctggccccagtggatcctgcccttcctgaggcacaggttccctgtatgtgccgggctcacgtggaggggccgagctgtgaccgctgcaaacctgggttctggggactgagccccagcaaccccgagggctgtacccgctgcagctgcgacctcaggggcacactgggtggagttgctgagtgccagccgggcaccggccagtgcttctgcaagccccacgtgtgcggccaggcctgcgcgtcctgcaaggatggcttctttggactggatcaggctgactattttggctgccgcagctgccggtgtgacattggcggtgcactgggccagagctgtgaaccgaggacgggcgtctgccggtgccgccccaacacccagggccccacctgcagcgagcctgcgagggaccactacctcccggacctgcaccacctgcgcctggagctggaggaggctgccacacctgagggtcacgccgtgcgctttggcttcaaccccctcgagttcgagaacttcagctggaggggctacgcgcagatggcacctgtccagcccaggatcgtggccaggctgaacctgacctcccctgaccttttctggctcgtcttccgatacgtcaaccggggggccatgagtgtgagcgggcgggtctctgtgcgagaggagggcaggtcggccacctgcgccaactgcacagcacagagtcagcccgtggccttcccacccagcacggagcctgccttcatcaccgtgccccagaggggcttcggagagccctttgtgctgaaccctggcacctgggccctgcgtgtggaggccgaaggggtgctcctggactacgtggttctgctgcctagcgcatactacgaggcggcgctcctgcagctgcgggtgactgaggcctgcacataccgtccctctgcccagcagtctggcgacaactgcctcctctacacacacctccccctggatggcttcccctcggccgccgggctggaggccctgtgtcgccaggacaacagcctgccccggccctgccccacggagcagctcagcccgtcgcacccgccactgatcacctgcacgggcagtgatgtggacgtccagcttcaagtggcagtgccacagccaggccgctatgccctagtggtggagtacgccaatgaggatgcccgccaggaggtgggcgtggccgtgcacaccccacagcgggccccccagcaggggctgctctccctgcacccctgcctgtacagcaccctgtgccggggcactgcccgggatacccaggaccacctggctgtcttccacctggactcggaggccagcgtgaggctcacagccgaacaggcacgcttcttcctgcacggggtcactctggtgcccattgaggagttcagcccggagttcgtggagccccgggtcagctgcatcagcagccacggcgcctttggccccaacagtgccgcctgtctgccctcgcgcttcccaaagccgccccagcccatcatcctcagggactgccaggtgatcccgctgccgcccggcctcccgctgacccacgcgcaggatctcactccagccatgtccccagctggaccccgacctcggccccccaccgctgtggaccctgatgcagagcccaccctgctgcgtgagccccaggccaccgtggtcttcaccacccatgtgcccacgctgggccgctatgccttcctgctgcacggctaccagccagcccaccccaccttccccgtggaagtcctcatcaacgccggccgcgtgtggcagggccacgccaacgccagcttctgtccacatggctacggctgccgcaccctggtggtgtgtgagggccaggccctgctggacgtgacccacagcgagctcactgtgaccgtgcgtgtgcccaagggccggtggctctggctggattatgtactcgtggtccctgagaacgtctacagctttggctacctccgggaggagcccctggataaatcctatgacttcatcagccactgcgcagcccagggctaccacatcagccccagcagctcatccctgttctgccgaaacgctgctgcttccctctccctcttctataacaacggagcccgtccatgtggctgccacgaagtaggtgctacaggccccacgtgtgagcccttcgggggccagtgtccctgccatgcccatgtcattggccgtgactgctcccgctgtgccaccggatactggggcttccccaactgcaggccctgtgactgcggtgcccgcctctgtgacgagctcacgggccagtgcatctgcccgccacgcaccatcccgcccgactgcctgctgtgccagccccagacctttggctgccaccccctggtcggctgtgaggagtgtaactgctcagggcccggcatccaggagctcacagaccctacctgtgacacagacagcggccagtgcaagtgcagacccaacgtgactgggcgccgctgtgatacctgctctccgggcttccatggctacccccgctgccgcccctgtgactgtcacgaggcgggcactgcgcctggcgtgtgtgaccccctcacagggcagtgctactgtaaggagaacgtgcagggccccaaatgtgaccagtgcagccttgggaccttctcactggatgctgccaaccccaaaggttgcacccgctgcttctgctttggggccacggagcgctgccggagctcgtcctacacccgccaggagttcgtggatatggagggatgggtgctgctgagcactgaccggcaggtggtgccccacgagcggcagccagggacggagatgctccgtgcagacctgcggcacgtgcctgaggctgtgcccgaggctttccccgagctgtactggcaggccccaccctcctacctgggggaccgggtgtcatcctacggtgggaccctccgttatgaactgcactcagagacccagcggggagatgtctttgtccccatggagagcaggccggatgtggtgctgcagggcaaccagatgagcatcacattcctggagccggcataccccacgcctggccacgttcaccgtgggcagctgcagctggtggaggggaacttccggcatacggagacgcgcaacactgtgtcccgcgaggagctcatgatggtgctggccagcctggagcagctgcagatccgtgccctcttctcacagatctcctcggctgtcttcctgcgcagggtggcactggaggtggccagcccagcaggccagggggccctggccagcaatgtggagctgtgcctgtgccccgccagctaccggggggactcatgccaggaatgtgcccccggcttctatcgggacgtcaaaggtctcttcctgggccgatgtgtcccttgtcagtgccatggacactcagaccgctgcctccctggctctggcgtctgtgtggactgccagcacaacaccgaaggggcccactgtgagcgctgccaggctggcttcgtgagcagcagggacgaccccagcgccccctgtgtcagctgcccctgccccctctcagtgccttccaacaacttcgccgagggctgtgtcctgcgaggcggccgcacccagtgcctctgcaaacctggttatgcaggtgcctcctgcgagcggtgtgcgcccggattctttgggaacccactggtgctgggcagctcctgccagccatgcgactgcagcggcaacggtgaccccaacttgctcttcagcgactgcgaccccctgacgggcgcctgccgtggctgcctgcgccacaccactgggccccgctgcgagatctgtgcccccggcttctacggcaacgccctgctgcccggcaactgcacccggtgcgactgtaccccatgtgggacagaggcctgcgacccccacagcgggcactgcctgtgcaaggcgggcgtgactgggcggcgctgtgaccgctgccaggagggacattttggtttcgatggctgcgggggctgccgcccgtgtgcttgtggaccggccgccgagggctccgagtgccacccccagagcggacagtgccactgccgaccagggaccatgggaccccagtgccgcgagtgtgcccctggctactgggggctccctgagcagggctgcaggcgctgccagtgccctgggggccgctgtgaccctcacacgggccgctgcaactgccccccggggctcagcggggagcgctgcgacacctgcagccagcagcatcaggtgcctgttccaggcgggcctgtgggccacagcatccactgtgaagtgtgtgaccactgtgtggtcctgctcctggatgacctggaacgggccggcgccctcctccccgccattcacgagcaactgcgtggcatcaatgccagctccatggcctgggcccgtctgcacaggctgaacgcctccatcgctgacctgcagagccagctccggagccccctgggcccccgccatgagacggcacagcagctggaggtgctggagcagcagagcacaagcctcgggcaggacgcacggcggctaggcggccaggccgtggggacccgagaccaggcgagccaattgctggccggcaccgaggccacactgggccatgcgaagacgctgttggcggccatccgggctgtggaccgcaccctgagcgatgggagacgacgcctctggagtgaacagtagggcagggtcaggaggtcggcgacacagccgtgtggccagacaggtggccccgggagacgtcagacccctcgacagcctccccaggaaat

SEQ ID NO: 760 - DNA, 6388 bp, Homo sapiens
tgcccgggaggacccgcttttgttccgcggagccgctggcccgaggcagctattgtcttgcgcccctggctgggctgcgtcaggctggggccagggccgggcgggtggcggtgtgagcgcggtgcccccgggtatgcagggcgggccgcagggtctctggagcccatccgcggggcctgggggggtcgggacccctggcagtttgaccctcctcttggcaccggcccggaccggatggacgcttcttggccagcgcccaggacaggtgcctggggacacgggtggagagccagggccttcctgagcggcttctgtctgtgcaggaaggaggctgaagtctgaagagggaagcccgggtaggccttctgctccctgagagggttcctcctctcccctccacaccccctacgccggctctgactcccgggacctgcaaaggagcttccggagctttaatggaagtcttctctgcctccgaggcgcacgtgatgggagggatagagacaggccctgcccactaatggatgctggaggagatctctaaggaaaacgggatcctccccctctcagcattgaggtggggggaggcataggcagtttgtcctctgctcagagcagtgctgggttcagtaacaggcagggaaactgagcagaggagagaccagccaagaccctctgtggtgggaggcaggtctcccacacacctgctacctgggcaactaggcccctgcctgtcctacggccctggtgtggcccccagggtctggccctcagaggtggagggaccagtttttgggaaatccatggtcacagtgtgtctgatgaccccaagctgagcttggggaagctgaggtggatgacagtcagccctgctctcccaccccaagtttgctcccccagcttggctttttggcatctctgcctggggccacgccctggcaggtgcactgctgtgtggagaagtaagctccaggtcttggagactggtcagaggctgtggcaccaagggaaagggcattttgtggtggccaagggcttgctgcctggtgagagatgccagcctggcttgtcctggactctacctgggagggccataatggggatggagaagattcattcattcatccatcggacagcagccacctcctgccctctgggagcctggcctgcaggtgtgggatccaggtgtgcaatctcaccttaactcattctctgtgtgtgctagccaggccttggacaggggaggggcctgcccctgcagtctgttcttcaggacacagaccgtggtgcatctgtgaagtccggtggtttgggtagataagtaatatgggaccagggcccagccacctgtgccccagcatccctctgtgtgttggtccaatcttgcttttctgctccctgtgttccttgcattttgccacaaaagtgagactgatgctacccagcacgtcccacgaccccagccccctctgtccttctcacctccttgtgaagaagctgagccgaaggtgcgtgatggggcccagagcccctatgctgggctcagccctgtgttcccgggaccctcttgtgagcaggggtaggtggtctacctccctggtcactctggcccctcccacaagcccaagggagctcatgggaaaccccaggcctgggcagcagcctgtttctgggccagtcctgggggccccagacctggtgcaccagagattgaagagccaagggagggatgagtgctgggaggccgggcggggtgcaagaggagcaaggatggggccccagctggggagggggtgatgagagacgactgacaggatgcagcatgtgggattgggctggaggtggggtgttcagggtagagcccatgtctagggtacagaggggagcagcccagagttgggtctgaggcagaggctgtgtggggctgcagggccagggtccctgagagtgggccagcctgggcaggtgcacgtcagacatggacactggggccagacagggatccagggactgcagccaactcctgttgagagtcagcccaccattccacagccccaccctaaagatgttgcagagagctgagccaccagctggctatgggcctctcactactctacacctcagtttctccatctgccagccagctctgagactcccagagtggatgctgggcagatgattggcagagttggtggcccctgtccctgtgtgttgagactctgtgaggccctgcatggataagggtctccgatacacggtggaggacgggaggatgtgtgctcacgagtgtgcctctgggaacagtgggcgccgtgcccttggggtgctgttagagcacacgggttgatgtgctcggcctgtgccgggctgggtacttgcacacgtgtatgtacatgcatgtgtccctgtctgaggggtcatgtatatgcatgtgtgtgtgcctgggcatgtgtagcaggggccgggctttcctgtgatcactggctgactcatgcacctgccacccgggtgaagtcatccctcgtttttagctccctgaggtcatttgccagcagggactcttggggcctctggatcctactgcggggctgctaggccggggctgatgggtggtgccgcagggttgccaggtcttgctgcgggggcgtggctctcctggaccaccccagctctgcctgtcagaccctcaccacagccttggtgggagggataagctgggccacagagtggcatcggggtcctgagatgtcctccccttttcctctcccgcttacccccactgcctagctagggaagagggggtttttctctgagtttttaatagatgtaaatatatacatatatgaggggctacatcccactggcagagtcctgggtaacgtttcctcagtcttgctttataccctcctcactctgtcgccagaactgcagcccctcagtgcctgggcccctgcttgaactcagatgagccccgcccagggcccagcagagagagctcagggcctgacacacatttgccagatacagatggggcagcccagccccagcagtgatgggccacacaagccttctcctgcttcagagcagtcccagctccccagtgcctttggagaagagcccagcctgccctgcctggcagcgtgccagttgtccccactctaggcctcagtctatttctttttcccagggaacaggtccccttttcctagccaggtccacagcaggcattccacctacatctcaagactgagggcgagatgaggcccaaagccttccttgccagattgccttctctgggggtgcttgaaatcccacttggactgtgaagttctaggagcagagcccaggcagccaggcctcactggccacgatgccggaggcacctgatgtgctggaggagaccgtgacggtggaggaggaccccggcacacccacttcccatgtgtctattgtcacatccgaagatggcacaacccggcgcaccgagaccaaggtcaccaagactgtcaagacggtgaccactcggacagtacgccaggtgcccgtgggcccagatggactccccctgctggatggcggccccccactaggcccttttgcagatggtgccctggaccggcatttcctgctgcgtggtggtggcccagtggccacactctctcgagcctacctcagcagtgggggtggctttcccgaaggccccgagccccgggacagccccagctatggcagcctgtcccgagggctgggcatgcggcccccacgtgctggcccccttggcccaggccctggtgatggctgcttcacactgcctggccaccgggaagccttcccggtgggtcctgagcctgggccaccaggtggccgctccctgcccgagcgcttccaggcagagccgtatggcttggaggatgacacgcgcagcctggccgctgatgacgagggtggccctgagctggagcctgactatggcacggccacaaggaggaggcctgagtgtgggcggggccttcataccagggcctacgaggacacagcagatgatggcggcgagctggcggacgagcggcctgcgttcccaatggtgacggcgcccctggcccagcctgaacggggcagcatgggcagcctggaccggctggtgcggcgctcgccctcagtggatagcgcccgcaaggagccgcgctggcgggaccctgagctgcctgaggtgctggccatgctgcggcaccccgtggaccccgtgaaggccaatgcggccgcctacctgcagcatctgtgctttgagaacgagggtgtcaagcggcgtgtacggcagttgcgggggctgccgctgcttgtggcactgctggaccacccgcgggctgaggtgcggcgccgggcctgtggggcactgcgcaacctctcctatggccgcgacactgacaacaaggccgccatccgggactgcggtggtgtgcctgccctggtgcgcctgctgagggctgcccgggacaacgaggtccgtgagcttgtcactggcaccctgtggaacctgtcatcctatgagcccctgaagatggtcatcattgaccatggcctgcagacgctgacccacgaggtgatcgtgccccactcaggatgggagcgtgagcccaacgaggactccaagccacgggacgccgagtggacaactgtcttcaagaacacgtcgggctgcctgaggaatgtgagctccgatggtgctgaggcccggcggcgactccgggagtgtgaagggctggtggacgcgctcctgcatgccctgcagtcggctgtgggccggaaggacactgacaacaagtcggtggagaactgcgtgtgcatcatgcggaacctgtcctaccacgtgcacaaggaggtgcccggggccgacaggtaccaggaggccgagcccgggcccctgggcagtgctgtaggctcccagcgccggaggcgggatgatgccagctgctttggaggcaagaaggccaaagaggagtggttccaccaaggaaagaaggatggtgagatggaccggaactttgacacgctagacctgcccaagcgaactgaggccgccaaaggctttgagctgctgtaccagcccgaggtggtacgtctctacctctccctcctcacggagagccggaacttcaacaccctggaggctgccgccggcgctctgcagaacctcagtgccggcaactggatgtgggccacgtacatccgcgccacagtgcgcaaagagcgcgggctgccggtgcttgtggaactgctgcagtctgagaccgacaaggtggtgcgcgccgtcgccatcgctctgcgcaacctctcgctggaccggcgcaacaaagacctcatcgggagctacgccatggctgagcttgtgcggaatgtgcgcaatgcacaggctccgccgcgaccgggggcctgcctggaggaagacaccgtggtggcggtgctcaacaccatccacgaaatcgtgtccgacagcctggataacgcgcgctcgctcctgcaggcacgcggggtgccagcgttggtggctctcgtggcctccagccaatcggtacgcgaagcgaaggcggcgtcacacgtgctgcagacagtgtggagctacaaggagctgcgtggtaccttgcagaaagatggttggaccaaggcgcgcttccagtcagctgctgctactgccaaggggcctaagggagcactgagtcctgggggcttcgatgacagcacgctgccactggtggacaagagccttgagggcgagaaaactggcagccgggatgtgatccccatggatgcgctgggcccagacggatactccacggtggaccggagggagcggaggccacggggcgccagctctgcaggagaggcctctgagaaggaacccttgaaaggatacagaagacgtcagcggactgaaagacaccagaccactgcacctgcacgagttaaacaggaaagaaggagggaagggcagaaaggagcatgggtcacctttggaggctgccaggggcccactcctttacgaaactggtcaagaggggaaagaaggcagcacctgtcctgcctgtcgcccgacactgcaagcctcctaccagctactcagaccacctggagaactggctaaacatgcatcagcgtctgagcaggactgaaaatctaatgccgtggagaagcgacagtgtcagaggagcaggtgacactatgctgaggtggttttcatctggcccaccctccttagactctcctcccttcaagagttggagcctcacagaggttgcagggagccaagatcgcgccactgcactccagcctgggcgacagagcgagagactgtctcgagaaacaacaacaaaaagttggagcctcagaccaa

SEQ ID NO: 761 - DNA, 1402 bp, Homo sapiens
aaattacattttagtggagtaaatgaagactggctactcggatcggcgcttagcctggtgggacgccaggcacgggaagcggaacctaagtgtcgaagacacagagattgactggaaggcctacatggccgaggtagaaggcgtcatcaatggtacctatgactatacccaactgcagggtgacaccggaccacttgtgtacccagctggtttcgtgtacatctttatggggttgtactatgccaccagccgaggcactgacatccgcatggcccagaacatctttgctgtgctctacctggctaccttgctgcttgtcttcttgatctatcaccagacctgcaaggtacctcccttcgtctttttcttcatgtgctgcgcctcttaccgtgtccactccatctttgtgctgcggctcttcaatgacccagtggccatggtgctgctcttcctcagtatcaacctcctgctggcccagcgctggggctggggttgctgctttttcagcctggcagtctctgtgaagatgaatgtgctgctcttcgcccctgggttactgtttcttctcctcacacagtttggcttccgtggggccctccccaagctgggaatctgtgctggccttcaggtggtgctggggctgcccttcctgctggagaaccccagcggctacctgtcccgctcctttgaccttggccgccagtttctgttccactggacagtgaactggcgcttcctcccagaggcgctcttcctgcatcgagccttccacctggccctgttgactgcccacctcaccctgctcctgctgtttgccctctgcaggtggcacaggacaggggaaagtatcttgtcgctgctgagggatccctccaaaaggaaggttccaccccagccccttacacccaaccagatcgtttctaccctcttcacctccaacttcattggcatctgcttcagccgctccctccactaccagttctacgtctggtatttccacacactgccctacctcctgtgggccatgcctgcacgctggctcacacacctgctcaggttgttggtgctggggctcatcgagctctcctggaacacatacccttccacatcctgcagctctgctgccctgcacatatgccatgccgtcatcctgctgcagctctggctgggcccgcagcctttccccaagagcacccaacacagcaagaaagcccactgaagtccacccctttccctcaggacctgagtctaccctcaggacctggggttggttggactctgcccttccaaataaaccttgctaagtccaactctgtgcaacctacatggaggtgggggcagccgatgcctggtccaggctgtgagggacacgtatggagcagataaagaattcactcaagca

SEQ ID NO: 762 - DNA, 3595 bp, Homo sapiens
actctgctctcggcctcccgggctgcggggacgggacggctgccggcgcggactttgcgggccgggagccgagtccaggacagagccggaaccgccgagggaggcgagagggcagtgcgcggagatggcggccgcggcggcggaggaagggatggagccacgggcgctgcagtacgagcagaccctgatgtatggccggtacactcaggaccttggggcctttgccaaagaggaagctgctcggattcgcctgggagggcctgaaccctggaaaggtcccccttcctctcgggctgccccagagctcttggaatatggacggagccgttgcgcccgatgccgcgtctgttctgtccgctgccacaagttcctagtatccagggttggtgaagattggatcttcctggtcctgctggggcttctcatggcattggtcagctgggtcatggactatgccattgctgcctgtctgcaagcccagcagtggatgtcccggggcttgaacaccagcatcttgctccagtacctggcctgggtcacctaccctgttgtcctcatcactttctcagccggattcacacagatcctggcccctcaggctgtcggctctggcatccctgagatgaagaccatcttgcggggagtggtgctgaaagaatacctcacactcaagacctttatagctaaggtcattgggctgacctgcgccctaggcagcgggatgccgcttggcaaagagggcccttttgtgcatatcgcaagcatgtgtgctgcccttctcagcaagttcctctccctctttgggggtatctatgagaatgaatcccggaacacagagatgctggctgccgcctgtgccgtgggggtgggctgctgcttcgcggcacctattggaggcgtcctcttcagcatcgaggtcacctccaccttctttgcagtgcggaactactggcggggcttcttcgctgccaccttcagtgccttcatcttccgggtcttggcagtctggaaccgggatgaagagactattacagccctcttcaaaacccgattccggctcgacttcccctttgacctgcaggagctgccagcctttgctgtcattggtattgctagtggcttcggtggagccctctttgtctacctgaaccggaagattgtccaggtgatgcggaagcagaaaaccatcaatcgcttcctcatgaggaaacgcctgctcttcccggctctggtgaccctgctcatctccacgctgaccttcccccctggctttggacagttcatggctggacagctctcacagaaagagacgctggtcaccctgtttgacaatcggacgtgggtccgccagggcctggtggaggagctagaaccacccagcacctcacaggcctggaacccaccacgtgccaacgtcttcctcaccctggtcatcttcattctcatgaagttctggatgtctgcactggccaccaccatcccagttccctgtggggccttcatgcctgtctttgtcattggagcagcatttgggcgtctggtgggtgaaagcatggctgcctggttcccagatggaattcatacggacagcagcacctaccggattgtgcctgggggctacgctgtggtcggggcagctgcgctggcaggagcggtgacacacacagtgtccacggctgtgatcgtgttcgagctcacaggccagattgcccacatcctgcctgtcatgatcgccgtcatcctggccaacgctgtcgcccagagtctgcagccctccctctatgacagcatcatccgaatcaagaaactgccctacctgcctgagctcggctggggccgccaccagcagtaccgggtgcgtgtggaggacatcatggtgcgggatgttccccatgtggccctcagctgcaccttccgggacctgcgtttggcactgcacaggaccaagggccgaatgctggccctagtggagtcccctgagtccatgattctgctgggctccatcgagcgttcacaggtggtggcattgttgggggcccagctgagcccagcccgccggcggcagcacatgcaggagcgcagagccacccagacctctccactatctgatcaggagggtccccctacccctgaggcttctgtctgcttccaggtgaacacagaagactcagccttcccagcagcccggggggagacccacaagcccctaaagcctgcactcaagagggggcccagtgtcaccaggaacctcggagagagtcccacagggagcgcagagtcggcaggcatcgccctccggagcctcttctgtggcagtccaccccctgaggctgcttcggagaagttggaatcctgtgagaagcgcaagctgaagcgtgtccgaatctccctggcaagtgacgcggacctggaaggcgagatgagccctgaagagattctggagtgggaggagcagcaactagatgaacctgtcaacttcagtgactgcaaaattgatcctgctcccttccagctggtggagcggacctctttgcacaagccttgccctcgagggaactctggaccaacgaagcaacaaagacagggattgagctgggtggaagccagaaggccaggccagggtcagagctaggcgggaggccaccacagcccagcaaggttgatacgcccatgcggaaaaaaacgggtgagaaacaggcaggataagaaaatgcaataaacaagccaacaaacatccaagtaggggtggggagactgcagagtagagataaacaaagatgagaaacacccagtggggggcttggaatgccagaccccagaaagtctgccttaatgtgggccgaaggaaaactggtacggacgcgggaagatggctcagcagaactgcaaagcagcctgcagaaatgcggcgaggaactgagcagactgcctggggtgggcgaggcagaccccagaggaggccaggagctctctgcgtccaggactcctaaggggggcagcctgcattggtaaaatggctcctgggaccagcagaagccaaggggtgttttagctaaacttttgacaggcataatgtacaagccttgaagcgttggggggtttgggggaggggataagcagcaggtagatgtacccaaaacctgcagcttgggcattcagcttacacacaagctctgcctaagagccagtatagcatggacaagcggagactgaggcaggaagcataggggacaaaagagaaacaaaaaggcaaaaataaaggaacttagaagtccttggatgagtggcaaactgcagtgcagttgcaagaaaaaaggtaataggcctgagagggcttttatctaaagcccttcttcccaaaacctctgaggcctttccacaatgatcttactcctcaaacatccatgatgatgatcatgctgacatttttcgagtgcttgctatgtgcgagacactgtgctaagctcttcaactgtttaatcatcacaagcacgcacttagatattgcgatcctccagtttttatagataagaaaactgagattcagagaggttgagcaagttgcacaaggacacacagctaataagtagcagaa

SEQ ID NO: 763 - DNA, 3814 bp, Homo sapiens
agtgcggccgcgaagcagagcgggctgtagagccttgcgcgcgcagtggggatggaacgttgctaggcttagcgggtctggctgctgggggcccgagcagcacgctcggagccgccgcgcgccaaagcgggaatctgggaggcgagcagctctgcagttaatgcacgtattttaaactcccgggcctgcggacgctatgcacaggaagcacctccaggagattccagacctgagtagcaacgttgccaccagcttcacgtggggatgggattccagcaagacttctgaactgctgtcaggcatgggggtctccgccctggagaaagaggagcccgacagtgagaacatcccccaggaactgctctcaaacctgggccacccggagagccccccacggaaacggctgaagagcaaagggagtgacaaagactttgtgattgtccgcaggcctaagctaaatcgagagaactttccaggtgtttcatgggactcccttccggatgagctgctcttgggaatcttttcctgtctgtgcctccctgagctgctaaaggtctctggtgtttgtaagaggtggtatcgcctagcgtctgatgagtctctatggcagaccttagacctcacaggtaaaaatctgcacccggatgtgactggtcggttgctgtctcaaggggtgattgccttccgctgcccacgatcatttatggaccaaccattggctgaacatttcagcccttttcgtgtacagcacatggacctatcgaactcagttatagaagtgtccaccctccacggcatactgtctcagtgttccaagttgcagaatctaagcctggaaggcctgcggctttcggatcccattgtcaatactctcgcaaaaaactcaaatttagtgcgacttaacctttctgggtgttctggattctctgaatttgccctgcagactttgctaagcagctgttccagactggatgagctgaacctctcctggtgttttgatttcactgaaaagcatgtacaggtggctgttgcgcatgtgtcagagaccatcacccagctgaatcttagcggctacagaaagaatctccagaaatcagatctctctactttagttagaagatgccccaatcttgtccatctagacttaagtgatagtgtcatgctaaagaatgactgctttcaggaatttttccagctcaactacctccaacacctatcactcagtcggtgctatgatataatacctgaaactttactcatccagaactcctaggagcttctagcgtctacccaaaaaggcttctttgtcatccattctttcctgtccttgccatctggcctcctgcttctttgcctgtgcagccccctggggagtgtggtgatcattctttttgggttgcttttctcaagagaatctatccatgtgtcttgcttttgttccttctctgcagaaagaaagaagctaagcaggtaatgacccaaatgctttttctcaagcagaggcgaggggaaggctgtgagctcttcattttaatatttttatccagtgggataatagtaatagtaattgcgatacctgcataataatggcatggtaatacttggaggcagtgtgaattgatagttacaaacacgggtctgaagtcacagacctgttgtgaaccttcactgtattattatttcttatttgtacaaatcttatgaaataagacaaacaggggcattaggagtttagttacaagtcagaccactagaatagagaagaagaaagatcctgtccttgaacattaaggtaaagagtatatttctttaggtattgtgtaaatagtacactgatttgcattgtgaatcctttaggatgagtttgttggtaccttatgcttaaaagtttcttgagataaaataagaattagaatgactctaatttcaatcattttggcagctgatatatttgaggtttataataaaaattccaggatgtttccataataatttcaagagagccatctatgctaaagaacttaaggctatttatttctcggaagtgggaaaatacaatttgaatgtctttcttctgtaatattttaaaatacttgggaaactataaagttttcttccccaggacctattcccattatatttattcccttacttcttaattggtcttcttctctatgtctaaacttccttctaattcttccctatttctcattcaagtaagaaacccaagctggaggtagtaaactaatctaagataagactaaaagacttctgtggtaggagcatttgtagttgaggcatttaagattttataaggaaaacaggattattgtacagataaggtaaggagcaatcctgtgaaagagttcataaatatcttttattttctaaaattcaatatacataagacattggtgtgattttacatttcttacattagaaataatggctcttgaactacttatttctatttgctatcccttagtttgctcttcagtctcttccattgtagtttttaaaagatgcttgcaaattttttattctgagttgtaggtaatgcacataccgggggcatttttttttttttgtctccttaaaattttagagactttctggatttttgacttggaactggttcttcatccatcatcttatcttatataacccccttatatataacacccgggtgtgttctgagagtctgttcttaatttctttcctcaccaaatctctttcccaatgctgttgcaagaacatgtcctcctctgccatctgccattcctccttttcttactccacctacagtttcttcccttaaatattctccagtgcagaatggctcacaatttggctaatttggatataccagaaccagaattctcatagtaattacaacgtttcccaagtttcacatgagggattcaaagttggagctggattgctgtcatcgtaagtgattaagtataagtatctgtgtatactgtgatcttacttcgacagtgtttctacattccagaaagcagtttacttaatgacagcaatttgttctttctgattttctttggttatatacctttagatcttattgtccccttgtgaacaagcatatttatttcccttggataatgcttttattttataaattagccttcatcttgtactcagctaacgtatattaaacatttgtggggtttaagacaccttgtagaatgtagaataaatacatttaggggagtagtgggaagactggaagagcaggttaaacacggaaggtcttcagactagctgaacagcctgggttctgtaaacacaagggaagcatcaaaggttttggagcagatgaatgactaacatgagctaggctttaggaggatgccttggaaattggtatatagaataggctagaaggaagaaagacagttataaggaaagtttggggctttttaaaaataattattgacaatgtgaaaatataaaggatgtttctgactttaggtaattgatgtgctcattgatctgtagtaggattttgttgaaattccaaaataaatgttccctttcctgagactttgtactgtatgtcccaaccttgagcaaacagagatgagagagatgaatttctaggcacatagatctgagttaagaaggaaaaaatcattaccaacaccaaacagtatttactttggaaaaacagaatttgtgaaacagaatttgagaaacagaatttgtgaaacagaatttcactgttaacagggttgaatttcatctaatgtgaaatacctaaagggactggcttatctatgcagaaaaaaaa

SEQ ID NO: 764 - DNA, 1732 bp, Homo sapiens
tagagacggggttttgccacgttggccaggctggtctggaactcctgacctcaagtgatccacccacctcggccgtccaaagtgctgggattacaggcatgaaccactgtgctcggccatgagagcatgtgtaggactccacagcttcagggcaccccagccctctttttgcgagtggttcactgcactgtgaaaacagattccagacgccgggaactcacgcctccaatcccagacgctatgtccagcaaaggctccgtggttctggcctacagtggcggcctggacacctcgtgcatcctcgtgtggctgaaggaacaaggctatgacgtcattgcctatctggccaacattggccagaaggaagacttcgaggaagccaggaagaaggcactgaagcttggggccaaaaaggtgttcattgaggatgtcagcagggagtttgtggaggagttcatctggccggccatccagtccagcgcactgtatgaggaccgctacctcctgggcacctctcttgccaggccctgcatcgcccgcaaacaagtggaaatcgcccagcgggagggggccaagtatgtgtcccacggcgccacaggaaaggggaacgatcaggtccggtttgagctcagctgctactcactggccccccagataaaggtcattgctccctggaggatgcctgaattctacaaccggttcaagggccgcaatgacctgatggagtacgcaaagcaacacgggattcccatcccggtcactcccaagaacccgtggagcatggatgagaacctcatgcacatcagctacgaggctggaatcctggagaaccccaagaaccaagcgcctccaggtctctacacgaagacccaggacccagccaaagcccccaacacccctgacattctcgagatcgagttcaaaaaaggggtccctgtgaaggtgaccaacgtcaaggatggcaccacccaccagacctccttggagctcttcatgtacctgaacgaagtcgcgggcaagcatggcgtgggccgtattgacatcgtggagaaccgcttcattggaatgaagtcccgaggtatctacgagaccccagcaggcaccatcctttaccatgctcatttagacatcgaggccttcaccatggaccgggaagtgcgcaaaatcaaacaaggcctgggcttgaaatttgctgagctggtgtataccggtttctggcacagccctgagtgtgaatttgtccgccactgcatcgccaagtcccaggagcgagtggaagggaaagtgcaggtgtccgtcctcaagggccaggtgtacatcctcggccgggagtccccactgtctctctacaatgaggagctggtgagcatgaacgtgcagggtgattatgagccaactgatgccaccgggttcatcaacatcaattccctcaggctgaaggaatatcatcgtctccagagcaaggtcactgccaaatagacccgtgtacaatgaggagctggggcctcctcaatttgcagatcccccaagtacaggcgctaattgttgtgataatttgtaattgtgacttgttctccccggctggcagcgtagtggggctgccaggccccagctttgttccctggtccccctgaagcctgcaaacgttgtcatcgaagggaagggtggggggcagctgcggtggggagctataaaaatgacaattaaaagagacactagtcttttatttcta

SEQ ID NO: 765 - DNA, 3735 bp, Homo sapiens
tgttgcccaggctggtctcgagctcctgagctcaagcgatccacccgcccatgcctcccagagtgctgggattacaggcgtgagccactgcacccagccctcttagccattttgttaacctcatttcccacctctggaggtggtaggggcttcccaagaagatcacttggacctcttcaagtatggtggcaatattgctgggctgttggagagacttctgttatagaggctcccctcttgtgtttttcctcaaaggcaaggagtcatttttggtcacatgaggacaaagagaccagaccagtagtgcattctgttttgcatgggaattgtcaaggctctttcagttttaactgaaacccaactcaaactggcctaagtcaaaaacgaatttattcatctatgtaactgaaaagagtgggccacaagggggaggcttcaggctagctgcatctaggttttaaatcatgtgaacagatctccctttccccctcccccatctcttgactttgctgtcatctgttagtttcattctgaagcaggcttccaccgtgaaatagaagaggtggcaactggtgacatcatgagacgatgtgtaatctgagcaaccctaaccaagaacttattttccttagtagttccagcaaaaatccagagaggactatccttggccaggctttaccccatgtccacttctggagccaagaaagacagttccttctccaaggggaacccagggtgttgatactagaagatggaaatggatacagtaagatgctgccacagtgagatgcctcacccaggtctccctctgtcacttcagccaagcacatgggatagaaagtagcaggcggcctctggccctttaatggaagagggccatccagtcctctccagttaacatctagaccgaacacaaagcatccttctctcatccagaagacataggaaccctaccttcagggatgatttttttttaacagtgaaatcttaaaagtaactgtttcactaaagcctccagtatttactgaagactgtcagaatcatcctccatcactagatcttctccaccagtcatgttccctgagcagtggggtggcttgaaggtataaaccagagaggcccaagggagggatagttagcagacttctggtctttttctagtttgtgctcttctgttccaaggaccacaggattcttctcatcgcagtgctccaggcagccactaccaatcgattggagttagcctgtgaggaaactggagaggcgtggctggaccaagacctccccccatgtgagcaggcttcctcctcccccaacaaccgttgccaccacgcccagaaacgtccttaagccctggccctcaggggaaaggtaacaggaggccagagccgggaccatgtgacggcgctggccctcgccaccgccgtcccccgaccctggccccaggcccggcaccatgatgttccgagaccaggtgggcatcctcgctggctggttcaaaggctggaatgagtgtgagcagacagtggccctcctgtcacttctgaaacgggtcacccgtacccaggcccgcttcctgcagctctgcctggagcactcactggcggactgcaatgacatccacctgctggagtcggaggccaacagtgctgccatcgtcagccagtggcagcaggagtccaaagagaaggtggtgtccctcctgctgtcccaccttcccctgcttcagccaggcaacacagaggccaagtcggagtacatgaggctactgcagaaagtgctggcctactcaatcgagagcaatgctttcatcgaggagagtcgccagctgctttcctatgccctcatccacccagccaccacactggaggaccgcaacgcactggccctctggctgagccacctggaagagcggttggctagtggcttccgctcccggccagagccctcctaccattcacgtcaaggctcagatgagtgggggggccctgcagagctaggccctggggaggcagggccaggctggcaggacaagccaccccgggaaaatggacacgtgcccttccacccatccagctcagtgccgccagccatcaacagtattgggagcaatgcaaacacaggtctcccctgccaaatccaccctagcccactgaagcgctccatgtcactcatccctacaagcccccaggtccctggtgagtggccgagtccagaggagcttggggcccgggctgcttttaccacgcccgatcacgcacctctctcgccccagagcagcgtggcctcctctggcagtgagcagacagaggagcagggctccagccggaacaccttccaggaggatggcagtggcatgaaagatgtgccctcatggctcaagagcctccgtttgcacaagtatgcagccctcttctcacagatgagctacgaggagatgatgacactgactgagcagcacctggagtctcagaacgtcaccaaaggtgcccgccacaagatagccctgagcatccagaagctgcgtgagagacagagcgtcctcaagtccctagagaaggatgtgctggaaggcgggaacctacgaaacgctctgcaggagctgcagcagatcatcatcactcccatcaaggcctacagtgtcctccaggccaccgtggctgccgccaccaccacccctactgccaaggatggggccccgggggaaccaccgctgccaggtgctgagcctcccctagcccaccccggcacagacaaaggcaccgaggccaaggaccctccagctgtggagaactacccacctccaccagctccagctcccactgatggcagtgagcctgccccggctcccgtcgccgacggagacatccccagccagtttacacgggtgatgggcaaagtgtgcacccaactgctggtgtcccgaccagacgaggagaacatcaccagttacctccagctcatcgaaaagtgcctgactcatgaggctttcacggagacgcagaagaaacggctgctatcctggaaacagcaagtgctgaagctcctccggacattcccgcgcaaagccgcactagagatgcagaactaccggcagcagaaaggctgggcattcggctccaactcgctccccatagctggctctgtggggatgggagtggcccggcgtacccagcggcagttcccaatgcctccccgggccctcccacccggccggatgggcctcctgagcccctcgggcattgggggtgtctcccctcgacatgccctcaccagccccagccttggaggccagggccgacagaacctgtggtttgccaaccctggaggcagcaacagcatgcccagtcagagccgcagctctgtgcagcgcacccactcgctcccggtccactcgtcaccccaggccattctcatgttccctccagactgcccggttcctgggcctgacctggagatcaatcccactctggagtctctgtgtctgagcatgacagaacacgccttgggtggagatggcttcaagtgctttaataaagaaccatgtactcaatcgtcttcggaagaggggtctccaaacggttgactggagggatcccttctggagggagtctccaaaagcctaatccctgaactgcacggcggggaggaggggaacacctgaatctcagaaggaacccgcccccttcgtcaaaggtgagcgcttcatgacgtcacgggcagacctgggggctg

SEQ ID NO: 766 - DNA, 2400 bp, Homo sapiens
acaatgcccagtggtacaaatatgggggtgtcagggaatcagggcacagagcctggtatcctaggggcaagaaagtacaagctcttaagccagatgtgtagcgttatgaggaagctgagctgggctggagaaactggggttccctgtatcctgatattattagaatcaaagggagtcagggtaacagagactggggttctaaggagacagatactgaggatctcaggatgtcacaatctcaggaaccaagatatctggagacatgggcattatgaaaacagagatggggttctgagcaccccaatatctgggatcacaaggatccaaggaaatgaaccagagctccagggacccagataccagggggtcttgaggacccaggagaacagagacccgggtttctgggtactcagttatgtggggccacaagtgatcagggtcctatttgaggtcaagatcaggtgggcagaagggatcaggggactgaggatcctaagattgggtaattctgagactttgggtaatttagaggcaggatgaaaatttcaggggtctccagacagaaagcctcaaggcctcaaggcctggtattggagatacgaggacctggaaacttgggagttcaagaacagagggcccacaaggatcagcagatgacgaagaccacacactcttctctccatcctatctccatccctgatctcaagaaggggtgtcctctaccacagctgtggccacgtcaccatccccaattgacccccaaagctgcagagagccgttctacagagccccaaaactttaggagccttactgcctttgtaccccactcgggccatgggctccccgtttcctctggtgaacctgcctacacccctataccccatgatgtgccccatggaacaccccctttctgctgacatcgccatggccacccgtgcagatgaggacggagacacgcctctccatattgctgtggtgcagggtaacctgccagctgtgcaccggctggtcaacctcttccagcaggggggccgggagctcgacatctacaacaacctacggcagacaccgctccacctggctgtgatcaccacattaccgtctgtggtccggctcctggtgacagctggtgccagccccatggcgctggaccgccatggccagacggccgctcacctggcgtgcgagcaccgcagcccgacctgcctgcgagccctgctggacagcgcagctccgggcacgttggacctggaggcccgcaattatgacgggctcaccgccctgcacgtggcagtgaacaccgagtgccaagaaaccgtgcagctcttgctagagcgcggtgccgacatcgacgcagtggacattaagagcggccgctccccgctcatccacgccgtggaaaacaacagccttagcatggtgcagctgctgctgcagcacggcgccaacgtgaacgcgcaaatgtactccggcagctccgccctgcactcagcgtccggccgcgggctcctcccgctggtgcgcacgctggtccgcagcggcgctgacagcagcctcaagaactgccacaacgacacgccgctcatggtggcgcgcagccgcagggtgagccggggcagctgtggacatgccccttgcacacgtgtgtccgcgggctggttgcaggtcatcgacatcctgagggggaaggccacccggcctgcttccacctcccagccagacccctcccctgaccggagcgccaacacctcccccgagagcagcagccgcctcagctccaatggtcttctctccgcatcaccatcctcctcaccctcccagtctccccccagggacccccctggattccccatggctcctcccaatttcttccttccttccccatctccacccgccttcctgccctttgctggggtcctccgaggccctggccggccggtgcccccctccccagctccaggaggcagctgagggggatgggggggcagatcttggactcatgaggaggggcccccctgccctgtggggtcaacccttctggaaactgtgaagatctcactctgccccccccccccatcttcgggaccaggatttgcacagaagcacatgcacctacccatacaccccctcttctgagcacagatgttcccccatctcgctccctcccaggactctgaccccagcattctcaggcaccagtccctgtccggaatgccacccacatcttccatttccatgtcccctcccagagctggtggacccagggaacagccactcccctccactctctaccagataactgaggaggggagaggtgggccgtaacgggcacggatcacgatgtaaattattaagcattttggttggatttcttttgtaataaactatttttgtaccata

SEQ ID NO: 767 - DNA, 4487 bp, Homo sapiens
tgcctggccttactgtaccttttctatatttagatatgttttgacttacgagtacttaccgttgttacagttgactatagtattcaggacatagcatgccctacaggtttttagcagtaggctgtattatatataccagatgtgtagtaggctatgctatcttggtttgtgtaagttccctctgtaatgaaatggtctgaaaatgcgtttctcagaacatgtccctgttattaagcgatgcgtgactgcatttgcatgtaacctatgcacatcctctgcaccctcccatatactgtaaacatctgattactggtaatacctaattaaatataaatgctatgtaaatgcttgttatactgggttgttttcttgtattatttttattgtattgctattttatattggtatattgcttccttttgtcttttttaaattatttaagtctgtaattggttgaatccatggatacagaccccatgcactgtatactctgtctgcccatcaatctgttaatagtcttcttttttgttttgttttgttttgtttttaatagtagtctttttgatcagatccaattttgtggtacctcattggttttgtttaagtgatccttattttacttaacatgccccccaagcacatgagcattgatgttggcaatttggatatgtcagtgagaatctgtcacaggcatcctttaagtggagtaaatagggttcagtactgttccaagtttcattcactcagggttttgcaacgtatccccttggataaagggattttactgtattctgtatccagcattgagcaccgaagccgtgttctcatttctgaaggctgagttcagcctctgattcacaaagaggtgagggggtgctgtgctctgcatggggtttggtcagagccaggtctgtgccctgaaggggagcttagtccagcccagctccccactgctgcagtgtgtgtgtgggcttctccaggaggggagcgggttctgaagaaaggggccaaaagctcacttgttcttcctgtaggagtttattgtcccggcatcaactctgatgcagtgggcagcagaggaccgtatttccacagggtgaggtcttccctgcgtgtgtggttgtggcacaggaagaaagtatgttgattctaaaccctaaacagcatatttttgacattcaggattgacttctaaagagtcatgttggccgggcgcgggggctcatacctgtaatcccggcactttgggaggccgagacgggcagatcacgaggtcaggagatcaagaccatcctggctaacacggtgaaaccccgtctctactacgaatacaaaaaattacctgggcgtgttggcgggcacctgtagtcccagctactcaggaggctgaggcaggagaatggtgtgaacccgggaggcggagcttgcagtgagctgagatcgggccacggcactccagcctgggtgacagagtgagactccgtctcaaaaaaaaacaaaaaaagtcatgttatgtgaaggagaagcccagaagaggaaagcagaggagtcaggcatgccacttactcagggacacttgacattcagggacgtggccatagaattctctcaggaggagtggaaatgcctggaccctgtgcagaaggctttatacagggatgtgatgttggagaactacaggaacctggtctccctgggaatctgtcttcctgacctgagtattatctccatgatgaagcaaaggacagagccctggactgtggagaatgaaatgaaagtagcaaaaaatccagataggtgggaaggtatcaaagatatcaacacagggaggagctgtgcagtgagaagcaaagcaggaaacaagcctattacaaatcaacttggattaacctttcagttacctctgccagaactggagatatttcaaggtgaagggaagatttatgaatgtaatcaagttcaaaagttcatcagccacagttcttcagtttcgccacttcaaagaatttactctggggtcaaaacccacatatttaataaacataggaatgattttgttgattttccattgctgtcacaagaacagaaagcacacattaggagaaaaccttacgaatgtaatgagcagggcaaagtcttcagagtgtcttcaagccttcctaatcatcaagtaatccacactgcagataaacctaacagatgtcatgaatgtggtaaaaccgtcagggacaagtcaggcctcgcagaacattggagaattcgtacaggagagaaaccttacaaatgtaaagagtgtggcaagctcttcaatcgaattgcataccttgcacgacacgagaaagtgcatactggagagagtccttacaaatgtaatgagtgtggcaaggtcttcagtcgaattacataccttgtacgacatcagaaaattcatactagagagaaacctcataaatgtaacaaatgtggcaaggtttatagtagcagttcatacctagcacaacattggagaattcatacaggagagaaactttacaaatgtaataaatgtggcaaagaatttagtgggcattcaagcctcaccacccatctgttaatccacactggagagaaaccttacaaatgtaaagaatgtgacaaagcttttaggcacaagttctccctgacagttcatcagagaaatcataatggagagaaaccttataaatgtcatgaatgtggcaaagtcttcactcaagtttcacatcttgcacgacatcagaaaattcacactggagagaaaccttacaaatgtaatgagtgtggcaaagtcttcactcagaattcacaccttgcaaatcatcagagaatccacactggagagaaaccttacaaatgccatgtgtgtggtaaggtctttaggcacagttcatggtttgtacagcatcagagaagtgttcatgagagagtccttacaaactgagtttggcaaactctatcataagttctagcagtaatcaacatccgagagtctatactagaaagaaatcatttaaatgtactatatgtggcacaggctgtatcgagacctaccaaatcactagacatcgaaacattcatctttggtgaaaccacacaaatggattgtgtgtgccaaggccaacaagtcaaaatatgttgaacctaatgatatgatgtgtataaagggtgcaaggacacgtggaaatgatctgtaatattcgggttattaaaaatgtaattggctgggcgcagtggctcacacctgtaatcctagcactttgggaggttgaggcaggtggatcacaaggtcaggagtttgagaccagcctggccaatatggtgaaacaccatatctactataaatacaaaaaaattagccaggcgtggtggcacatgcctgcaatcccagctactcgggaggctgaggcaggagaattgcttgaatccaggaggcagaggttgttgcagtgagctgagatcgcgccactgcactccaacctgggtgacagagcgagactccgtctcaaaaaaaaaaaaaaattatttgggtttgaaaggccaggggcagtggttcatgcctataatctcagcacaatagaaagccaagacaggagggtcacttgatgcctggagatcaagataagtatgggcaacgtagcaaggcccatccctacaaaataaaaaaaataagccaggcccttggcatgtgtctgtagttccagctactcaagaggccgaggcaagaggattgctcaagcccaggagtttgagagtttgagcagtgagctctgatcttgccatttgtactccagcttgggtgacagagcgagaccctgtctcaaaagaaaaaaaaggctagtttttatgacttcaacctgaactttgaaatttcttcatgtgccttccctacaggcctttcactgtggtctgggaaagaatcagtaagatgacagggctgacttcattagatgaggagcgtttctatccagtttcctggaggaataaggacactgccttttcagattaaagattgtctgatttagagaccatggaggtggacagagaataacaaaaccgtgatggcagtcatcatgcttattgcagttagcacacacttttcctgacaggcacagtgctgctgtgctctacaaatgaccatgaaatagagcacgccatgactttaggacacagggatttttatgggaagagagttcatcagggactgattacgtaggagagacgatgcaggggaaatggtggccaccgtctccattgaatagcaatagctgctgtttagcaaagactgattaaaaagtactctgatttttcaaatggaagagagaacagttaaatcagagtagagagtttaatcaaaactaccagtggaacatgttcttgagtaggattcacatttaactgctggcataatttgcaactgttggattttctcatgtttggaacaataaagttgaaattttccaaagtgtgaa

SEQ ID NO: 768 - DNA, 3250 bp, Homo sapiens
tgaaggcagggccactgtccccagtcgaacctgccactggccaacaaccccacctggagaagatgcctcgtggagccctgacctctttttctgccactcagtctctgtccctttcactgagcgagactgccctgacccttcctgatagttttggtccacctgagtgcactggaggatgttgtggctaacggtgggcacagtgacatggactccccatacttggagagttgagtgaatggaagaggcactagtgtggacccaatggcaagagaggttaacatcagggccattgctccaagcctgatcctctcccaggaggtcaacccagatcccatgggagtggaaccattcagaaataggtctgtgtccctggtggaatgccaagagatgagatgacagatacacctccatctttgcccatcagcatctgtgcccctctccagccactaaaccttcacccagggccagtctttctcagctatggattctcactacatcctgccatttccaagacaccttcctgaggatcaaaaaaaggcaccttcacagccctggggcaacccagctgtatgtcggtccccactgtccaccctggcctgggacccactgtccaggcagccctggcctatgcagcaccagactcatgctcccctggggactggctcaggggccagtcttggtccatgtgcctggagctgggctctcagagctagtgtggatgggagagcaccatcctgctagggccaccgggattctgataactcagccagtgagcagctgtcctggggaaatcaaggccaccagaagcagatgctggagccatgcatcttacacagcctgcagaaccatgagccaaataaacttcttttcttgcaacacaaaacggactaaaccagagggttctcactgagaaggacccatgaccaccatgtacagttgcataggctgctgactgcatatggatgcccagccaagaggatgtggacgaatgtcagcagaacccaaggctctgtaaaagctacggcacctgcgtcaacaccctcggcagctacacgtgccagtgcctgcctggcttcaagctcaaacctgaggacccgaagctctgcacagatgtgaatgaatgcacctccggacaaaacccatgccacagctccacccactgcctcaacaacgtgggcagctatcagtgccgctgccgcccgggctggcaaccgattccggggtcccccaatggcccaaacaataccgtctgtgaagatgtggacgagtgcagctccgggcagcatcagtgtgacagctccaccgtctgcttcaacaccgtgggttcatacagctgccgctgccgcccaggctggaagcccagacacggaatcccgaataaccaaaaggacactgtctgtgaagatatgactttctccacctggaccccgccccctggagtccacagccagacgctttcccgattcttcgacaaagtccaggacctgggcagagactacaagccaggcttggccaataacaccatccagagcatcttacaggcgctggatgagctgctggaggcccctggggacctggagaccctgccccgcttacagcagcactgtgtggccagtcacctgctggatggcctagaggatgtcctcagaggcctgagcaagaacctttccaatgggctgttgaacttcagttatcctgcaggcacagaattgtccctggaggtgcagaagcaagtagacaggagtgtcaccttgagacagaatcaggcagtgatgcagctcgactggaatcaggcacagaaatctggtgacccaggcccttctgtggtgggccttgtctccattccagggatgggcaagttgctggctgaggcccctctggtcctggaacctgagaagcagatgcttctgcatgagacacaccagggcttgctgcaggacggctcccccatcctgctctcagatgtgatctctgcctttctgagcaacaacgacacccaaaacctcagctccccagttaccttcaccttctcccaccgttcagtgatcccgagacagaaggtgctctgtgtcttctgggagcatggccagaatggatgtggtcactgggccaccacaggctgcagcacaataggcaccagagacaccagcaccatctgccgttgcacccacctgagcagctttgccgtcctcatggcccactacgatgtgcaggaggaggatcccgtgctgactgtcatcacctacatggggctgagcgtctctctgctgtgcctcctcctggcggccctcacttttctcctgtgtaaagccatccagaacaccagcacctcactgcatctgcagctctcgctctgcctcttcctggcccacctcctcttcctcgtggcaattgatcaaaccggacacaaggtgctgtgctccatcatcgccggtaccttgcactatctctacctggccaccttgacctggatgctgctggaggccctgtacctcttcctcactgcacggaacctgacggtggtcaactactcaagcatcaacagattcatgaagaagctcatgttccctgtgggctacggagtcccagctgtgacagtggccatttctgcagcctccaggcctcacctttatggaacaccttcccgctgctggctccaaccagaaaagggatttatatggggcttccttggacctgtctgcgccatcttctctgtgaatttagttctctttctggtgactctctggattttgaaaaacagactctcctccctcaatagtgaagtgtccaccctccggaacacaaggatgctggcatttaaagcgacagctcagctgttcatcctgggctgcacgtggtgtctgggcatcttgcaggtgggtccggctgcccgggtcatggcctacctcttcaccatcatcaacagcctgcagggtgtcttcatcttcctggtgtactgcctcctcagccagcaggtccgggagcaatatgggaaatggtccaaagggatcaggaaattgaaaactgagtctgagatgcacacactctccagcagtgctaaggctgacacctccaaacccagcacggaggcatacaaagatggggcttctgagaaagaacaggatggagcaaaatgaaagctgatatggccttttgatgttgccctgacaaatacatatggtaagaaaaccttatgattaaagacttcttggccaggcatggtggctcacacctagaattccagcatttt

SEQ ID NO: 769 - DNA, 5964 bp, Homo sapiens
aggaaaccgaaactcccgccggatgcataaaagactggctgcggtggctcagagcgccgagtcctaggccaggtctggggtaacctggaacttccacctgggctctgcgctaggtctctgtttcactccctccccgcggggcgcgcagctcgcgggtctttggacaccaccggtcctgagtccgcggactgccattttcattaagaactgccacttagaggtaccaaaataaagggtatttgctacctttaatacttgccagttcaggttggaggcacaggcagcagcaagaatggaaagaaatgttcttacaacattttcacaggaaatgtcccagttaattttgaatgaaatgccaaaagctgaatattccagtttattcaatgattttgttgaatctgaattttttttgattgatggggattcattacttatcacatgtatctgtgagatatcatttaagcctgggcagaacctccatttcttctatctggttgaacgctatcttgtggatcttattagcaaaggaggacaattcaccatagttttcttcaaggatgccgagtatgcgtatttcaacttccctgaacttctttctttgagaactgctttaattcttcatcttcagaagaataccaccattgatgttcgaacaacattttcgagatgcttatcaaaagagtggggaagtttcttggaagagagttacccatatttcctgatagttgcagacgaaggcctgaacgatctacaaacacagcttttcaactttttaatcattcattcttgggcaaggaaggtcaacgttgtactttcctcagggcaagaatctgatgttctttgcctttatgcataccttcttccaagcatgtacagacaccagattttttcctggaagaataagcagaacattaaagatgcttatacaaccctgcttaaccagttggaaagatttaagctttcagcattagcacctctttttggaagtttaaaatggaataatattacggaagaggcacacaagactgtatctctgcttacacaagtctggccagaaggatctgacattcggcgtgtcttttgtgttacttcatgctcattatctttgagaatgtaccatcgctttttaggaaacagagagccctcctctggtcaggaaactgagatccaacaggtgaacagtaattgcttaaccctgcaggagatggaagatttgtgtaaactgcattgtctcactgtggtttttctactccatctgcctctttctcaaagagcttgtgctagagtcatcacttcccattgggctgaggacatgaagcctttattacaaatgaaaaagtggtgtgaatatttcatcttaagaaatatacatacttttgaattttggaatctgaatttaattcacctttctgacttaaatgatgagcttttgttgaagaatattgctttttactatgaaaatgaaaatgtaaaaggcctacatttgaatttgggagataccattatgaaagattatgaatatctctggaataccgtatcaaagttggtcagagactttgaggttggacagccatttcctctgagaacaacaaaagtttgttttcttgaaaagaaaccatcaccaatcaaagacagctccaatgaaatggtgcccaatttgggttttattccaacgtcatcttttgtggttgataaatttgctggagatattttgaaagatttgccttttctaaagagtgatgatcctattgttacttcactggttaaacaaaaggaatttgatgaacttgtgcactggcattctcataaacccctgagtgatgattatgacaggtccaggtgtcagtttgatgaaaaatctagagaccctcgtgttcttagatctgtgcaaaagtatcatgttttccaacggttttatgggaattcattagaaacagtctcttcgaaaatcatcgtgactcaaactattaagtcaaagaaggattttagtgggcccaagagcaaaaaggcacacgagaccaaggctgaaataattgctagagagaataagaaaaggttatttgccagggaagaacaaaaggaagagcaaaagtggaatgctttgtcattttctattgaagagcaattgaaagaaaatttacactctggaataaagagcctggaagattttttgaaatcctgtaaaagtagctgtgtgaaacttcaggttgaaatggtggggttaactgcttgcttgaaagcctggaaagaacattgccgaagtgaagaaggtaaaaccacgaaagatttaagtatagctgttcaggtgatgaaaaggatccactccttgatggaaaaatactcagaacttttacaagaagatgatcggcaactcatagccagatgccttaagtatttaggatttgatgagttggcaagttctttacatccagcccaggatgcagaaaatgatgtaaaagtgaagaaaaggaataaatattcagttggcattgggccagctcggttccaactgcaatacatgggccattatttgatacgagatgagagaaaagacccagatcccagggtccaggattttattcccgacacatggcagcgagagctccttgatgttgtggataagaatgagtcagcagtgattgttgccccaacgtcctcaggcaaaacctatgcctcctactactgtatggagaaagtgctgaaggagagcgacgacggggtggtcgtgtacgttgcacccacaaaggcccttgttaatcaagtggcagcaactgttcagaatcgttttacgaaaaatctgccaagtggtgaagttctctgtggtgttttcaccagggagtatcgtcatgatgccttaaactgtcaggtacttattacagtgcctgcctgctttgaaattctgctgcttgctcctcatcgccaaaactgggtgaaaaagatcagatatgttatatttgatgaggttcattgtcttggtggagaaattggagcagaaatctgggaacatctccttgtcatgatccgatgtccctttttggctctttcagctaccataagtaatcctgaacatctcaccgagtggctacaatcggtaaaatggtactggaaacaagaagacaaaataattgaaaataataccgcttctaaaagacatgtgggtcgtcaggccggctttcccaaagactacttgcaagtaaaacaatcgtataaagttagacttgtgctctatggagagaggtataatgatctagagaagcatgtatgttcaataaaacatggtgacattcattttgatcattttcacccatgtgctgcactaacaacagatcatattgaaaggtatggattccctcctgatcttaccctttcacctcgagaaagcatccagctgtatgatgccatgtttcaaatttggaaaagttggcctcgggcccaggaactgtgcccagaaaacttcattcattttaacaataaattagtcattaaaaagatggatgctaggaaatatgaagagagtctaaaggcagaattaacaagttggattaaaaatggcaacgtagagcaggccagaatggtacttcagaatcttagtcctgaagcagatttgagtccagaaaacatgatcaccatgtttccacttctagttgaaaaactaaggaaaatggagaagttacctgcactattttttttattcaagttaggagctgtagaaaacgcagctgaaagtgtgagcactttcctaaagaaaaagcaggagacaaaaaggcctcccaaagctgataaagaagcccatgtcatggctaacaaacttcgaaaagttaaaaaatccatagagaaacaaaagatcatagatgaaaagagccagaaaaaaaccagaaatgtggatcaaagcctaatacatgaagctgaacatgataatctagtgaagtgtctagagaagaacctggaaatcccacaggactgcacatatgctgatcaaaaagcagtggacactgagactttgcagaaggtatttggtcgagtaaaatttgaaagaaaaggtgaagaattgaaagccttggcagaaaggggtattggatatcatcacagtgctatgagtttcaaagaaaaacaattagttgaaatcctctttagaaaaggatatcttagggtggtgacagctactggaacacttgctttaggtgtcaacatgccttgtaaatctgtggtttttgctcaaaactcagtctatctggatgcgttgaattatagacagatgtctggccgtgctggaagaagaggtcaagacctgatgggagatgtatatttctttgatattccattccccaaaataggaaaactcataaaatccaatgttcctgagctgagaggacacttccctctcagcataaccctggtcctgcgactcatgctgctggcttccaagggagatgacccagaggatgccaaggcaaaggtgctatcagtgctaaagcattcattgctgtccttcaagcaacccagagtcatggacatgttaaaactttacttcctgttttctttgcagttcctggtgaaagagggctatttagatcaagaaggtaatcctatggggtttgctggacttgtatcacatttgcattatcatgaaccttctaatcttgtttttgtcagttttcttgtaaatggactcttccatgatctctgtcagccaaccaggaaaggctcaaaacatttttctcaagacgttatggaaaagctagtattagtattggcacatctctttggaagaagatattttccaccaaagttccaagatgcacacttcgagttttatcaatcaaaggtgttccttgatgatctccctgaggattttagtgatgctttagatgaatataacatgaaaattatggaggactttaccactttcctacgaattgtttccaaactggctgatatgaatcaggaatatcaactcccattgtcaaaaatcaaattcacaggtaaagaatgtgaagactctcaactcgtatctcatttgatgagctgcaaggaaggaagagtagcaatttcaccatttgtttgtctgtctgggaactttgatgatgatttgcttcgactagaaactccaaaccatgttactctaggcacaatcggtgtcaatcgctctcaggctccagtgctgttgtcacagaaatttgataaccgaggaaggaaaatgtcgcttaatgcctatgcactggatttctacaaacatggttccttgataggattagtccaggataacaggatgaatgaaggagatgcttattatttgttgaaggattttgcactcaccattaaatctatcagggacctttgagatcacactgaacctgcccagataatccaggattattttcctatctcaaggtcagctgattcgcaactttaattcgcactgcagccataattcattcccctttgccatgtaacctgacctattcatcggtttctggggaatatatgatatggacatctttgcagggccattattctgcttaccatatcttgttgtccttatctttttacacatctaggtaaagaaagcaatattttcctcttcgtagatgtagctgcctgtgggtttcagtatacactggacactagcataaataacacaaaatgactccacaagagatatgtagaggaaagaaaaggaatttgcgttgcacttttgaagggagaagggatcaagttatgtggaatttgatggcttttcagactctcttggtaatagtcatggagaagaattgcatggggttgttttgttatcttttcttaaattttttatacaagattttttaggagaaatatgtttcttatcattattcctcatattttgctaacataatttcatcatctgatgggatttccttacttctgcctaaccaaggaaagcctttcttataatattcaatctcactaaagtggatcctatatttt

SEQ ID NO: 770 - DNA, 4876 bp, Homo sapiens
atccctgttctggaatctcccctcactctctacaagcccctaatacaataaatccataataagtgcccagttaagtaggttgcattgtttggaagtctatcaagggactaaagttaaaggatggtcatattttatgctttgcacattgagttgaaaagttagctgcagacagaaaactgatctaagtcaaaagtcttagactggagtctcatcagtgttgctcaattgacctggtgatctttggcctgagattcaacctctgtgtctttaccagtgatttatgaatacctaagttttcttttatcccaaatgttctaagatagcttgattgctctatagtagtggttttccaagtgtggtacctagatcaagaacagcatcatcttggaacttgttaaaaatgtaagttatttgacccagtcgcaggctactgaattagaaactctcaagctcgcggacaagccctcctggtgattatgatgcacgataaaggctgagaactactgatctggagtatagtcaaatttgtggtatagagagaagctctataccacaatgttagcagacattgaagattgtgtagcaatttcatgattggcatttacgtctcgtatctgatgtttcagctttcagtctctgtagcatggctcaccattgcatcatattcaagtttccagggactacccacgggattgtagcttccaagctcctaaaaagtactggcaattcagaagtgaaaaatgtttcttagggtgtacaaagaatgtgcaatggacaagggattaattgccagtggcagtctcctaattttgtattcataacgttgtatgcatgctaggctacacatgcaacgtctgctgatatacattaagtaattgggcatccagcagccccatttgcatgcaaaggctgttgcacacctcacatttacaagtctaaaattaaagcccagtttgaagctggctgaaggctagctgctagaaaaataatgagataaggaaggaaatggcttctgttgatcagtgcttttggcctctacagttcaatctttgctaatttgccctttgaaattgtgtattcaggtagaagagagagacttccaagagtatctgggtggggttttttccctccctcttaaatcctacagttagaagctggttgtgtttatccacagcatttctcttaaaactgtacctacatgtatgctgcagtctgttgctgtgctatattattgcttaatggagtattcatgttcttgtgggatcacgtgcatcatctcaaaaaagagccacccccacacagactcacaggctgggtctgtagcatcattttgttttaattcagcccacatttatcaagcagccaatgtctttgtgccagacactgtgccaggggcttggaatacacatcaatcaagcacactctctgccctcaaaagctcacaatattttaacagcttcctagtgtcacagaggtgaatatttttcttaaaaagtcttccctgatccgcctggttgaaatgactccttgcttctccgagcccctgattatgctcaacctgtgtccctaggagaagaagagaccagtggacataggcctagaaaagtcaaagcctaaaagccagttagttactcagatcatcaagaggaggtggctgcattgcaaatggcctctaggatcagtctgtgggaacagaaaatgtaccaatgtttcctgtaccccggtgtggtcacacagaagagaatgccaatctaaagccatcttaaaggaatttactcacaagcaccacctagaggaacggtggagccctacaaggacagtacaccaactagtcacttgtcactcatcgaatgctttatattttcatatttggccatgtcctttgttttactttgacatcaagattgtgaggtcccagagaacagatcagggtcttaagaagattatctttcatagtgcctatttgatgcacaagtgcatacaccttgatagcaccaaatataaaccggagaaatgagatacaaagaattgcggagcaggagctggccaacctggagaagtggaaggagcagaacagagctaaaccggttcacctggtgcccagacggctaggtggaagccagtcagaaactgaagtcagacagaaacaacaactccagctgatgcaatctaaatacaagcaaaagctaaaaagagaagaatctgtaagaatcaagaaggaagctgaagaagctgaactccaaaaaatgaaggcaattcagagagagaagagcaataaactggaggagaaaaaaagacttcaagaaaaccttagaagagaagcatttagagagcatcagcaatacaaaaccgctgagttcttgagcaaactgaacacagaatcgccagacagaagtgcctgtcaaagtgctgtttgtggcccacaatcctcaacatggaaacttcctatcctgcctagggatcacagctgggccagaagctgggcttacagagattctctaaaggcagaagaaaacagaaaattgcaaaagatgaaggatgaacaacatcaaaagagtgaattactggaactgaaacggcagcagcaagagcaagaaagagccaaaatccaccagactgaacacaggagggtaaataatgcttttctggaccgactccaaggcaaaagtcaaccaggtggcctcgagcaatctggaggctgttggaatatgaatagcggtaacagctggggttctctattagttttttcgaggcacctaagggtatatgagaaaatattgactcctatctggccttcatcaactgacctcgaaaagcctcatgagatgctttttcttaatgtgattttgttcagcctcactgtttttaccttaatttcaactgcccacacacttgaccgtgcagtcaggagtgactggcttctccttgtcctcatttatgcatgtttggaggagctgattcctgaactcatatttaatctctactgccagggaaatgctacattatttttctaattggaagtataattagagtgatgttggtagggtagaaaaagagggagtcacttgatgctttcaggttaatcagagctatgggtgctacaggcttgtctttctaagtgacatattcttatctaattctcagatcaggttttgaaagctttgggggtctttttagattttaatccctactttctttatggtacaaatatgtacaaaagaaaaaggtcttatattcttttacacaaatttataaataaattttgaactccttctgtataaatgggtcatttttatttttaatgaaaagttattggggttttctctcttgaagggtctcattttaattcccttttccaggccgtatagatcaaatatagtactgtcattactgttggctcttgttttggtcttgacttactaatagtgttaccctgattttcagagggggacagtttatctccagaaaggccaatgtttgtatacacatcagctagacacaaatatagacatcatatgtagtttgtacatgtttcagaaacttgttttttctttgctctgtgtaacctatttcctattgctagttcagttggctttcttattcacttctgtgaccctgaaccagttctcagaccctagagtgtaagagcattgattttctacgctgtgtaatctagctcaatccctctgtcccctccgcctcaccgtcccccagccaccacattgtatagcaaaagcattacattcaatcctagaataaaggtaaatacaacaaatcatctttgcagctggacaactaataatactttgcagcattaagagatcttctgtgttaccagtcactctgttgaaatgaactttccgaatctctttattcaggaaaacatggggttttgaaattcttgggccaagagacataactgaggggttcgcagagctaggcaagggtgcactaggaaagggccacattggtgggtggggggtaacagagaacagatggtgtcaggaagtttctctggagtaaataatgtggatattcttggtttccctctcctccgccagctgaagctgtgttagtgctgttgacactaatataaaatgtttggtccatttgaaatccttgtcattgccttatatgggggaaactcaatcccccagcctgtgttggaaatatcaccaaactgattgtaaatgtgcggctgtagcagacattttagtgtggtggtgtgcagccatttcggccctacacctgccagcctggctaccttacagttgtgttccgatttttgcgtctatgcttggtgtgcctcacttgctgcattttccagcatgcaaccaggagttgacgtaggaaaaagggatgctttcttactttggaagctctcagggaagttggtgtcaatttctcctccactgcctggcctaccctgcactcccaaagattttgtgcagatgggtagttccattttttaaaaattgtgcagatatggaaaattgtgacttacttcatgaccagaactatctagaatatgtgtgggggtataaacatcttgcttaaccaaatatctatgtaggcagaggtaaccaggagagaagcaagacttgctgcctaaaggagcccaccattttacttttcacatttaatctgccacgttgaatcaattggaataaaacctgactcgcaggtgactggacaggaaatcccaaagttccaccatttctatgcttaattttaatgtccccccgcttttttttttgtagaaaataaaaacaagaaaatcgttccaatgtaagatgtttgttatagaaactttaggcaatacaggtgtgtaataaaatgtttaataaacttctaaacacttttgtatttggattta

SEQ ID NO: 771 - DNA, 6294 bp, Homo sapiens
aggtggcggccctggcctggatcgggaaggagtcggctctgccctggcccgcaaggctggggagctaatgagcctctctggctagtctcctccccgtccactccctccactttctgccgccgggacccggctgggagccggctgtggcagtggcagtggcagtggcagcgacaggatgttctccaagaagccgcacggggacgtgaagaagtccacccagaaggtgctagacaccaagaaggacgcactgactcgcctcaagcacctgcgcatcgtcatcgagaatgcagaatctattgatcttaaacagtttttcgaccaacatttttcacatatatactatgtgttctttgaaaattttgtgactattgaagctagtcttaaacagaaaggtcacaagtctcaaagagaggaattggatgctatactttttatttttgagaaaattttacaacttcttccagaaagaattcatcagcgatggcagtttcatagtattggattgattttaaagaagctacttcacacaggaaactccttaaagattaggcgggaaggtgttcgtcttttcttactatggttgcaagctcttcagaataactgtagcaaagaacagctctggatgttttcatgcttaatccctggattttcagcaccacagtctgaacatggacctcgaactttagataatctcattaatcctccactcaaccttcaagaaactcaagtcactatagaagaaatcactcctcttgtccccccacaatcaggagataaagggcaagaagatctcacaagctattttcttgaagcacttctaaaatacatagtcattcaggtaaaaagtttagaatggaagaacaaagaaaaccaagaaaggggattttcatttttgttttcacattttaagaaatattacttgccttatatttttccaaacatctgtaaggaaaacagtttatatcatcctatacttgacatcccgcagatgagaccaaagccacattatgtcgtgataaagaaagatgctgaaaccaatgaagcaatctattgtacaaaggagcctttcattaaggctcgtgttattgtcattcgttggctggtttctttctggctggagccaaaaccacatacaggacctcatattcctgggatggaaggtgaagtcttgccaaagaatattcagagagcagctgctagtttagtatccagagaagaaagcaaaaatgataatgctgataaaacagacagaactacagaacccgaacagtctcattccaatacaagcactctcacggagcgagaacctagctcatctagtctctgtagtattgatgaagaacatctcacagacattgaaatagttcgcagagttttttcttctaaaaggagtaatgtaaactttgtgacagagatatttcgtcaggcatttttattaccaatttgtgaagcagcagctatgagaaaagtggtaaaagtatatcaagaatggatccaacaagaggaaaaacctttgttcatgcaagagcctgaagaaattgtgatcacttcttcagacctcccttgcattgaaaatgtcacagaccatgatatttcaatggaagaaggagaaaaaagagaagaggaaaatgggaccaatactgctgatcatgttcgaaattccagttgggcaaaaaacggctcctaccaaggtgctcttcataacgcctctgaagaagccacagaacaaaacatacgagctggtacccaggcagttttgcaggtgtttattataaactcatcaaatatatttcttcttgaacctgcaaatgaaataaaaaatcttctggatgaacacacagatatgtgtaaacgcattcttaacatttatcggtacatggttgtacaagtatcaatggacaaaaagacttgggaacagatgctgcttgtgttgctcagagtcacggaatctgtactgaagatgccatcacaagcttttctacagttccaagggaaaaaaaatatgaccttggcaggtcgacttgcaggaccacttttccagacccttatagttgcctggatcaaagcaaacctaaatgtgtacatctcccgagaactttgggatgacttactgtcagtattgtcatcgctgacctattgggaagagttggccactgagtggtcactgactatggagacattaactaaagttttagctaggaatttatatagtttggatctcagtgatttaccattggataagctgagtgaacagaaacaaaaaaagcacaaagggaaaggagttggacatgaatttcagaaagtttcagttgacaagtcattttctagaggatggagtcgtgatcagcctggccaagccccaatgagacagaggagtgcaacaaccactggttctccaggaaccgaaaaggcgaggagtatagtacggcaaaaaactgtcgccatgagaagccgatccattggtgaatgtgctctgccatcggcctatatacgcagtgctaaaagtgctcctgttctgatccatacttccaaacccttcttgcctgatattgttctcactcccctttctgatgagctttcagatattgatgatgctcaaatacttccccgctcaactagagtcagacatttttcacaaagtgaagaaactggaaatgaagtttttggtgctttgaatgaggagcagccattgcctcgaagtagcagcacttctgacatcttggaaccattcactgttgaacgagccaaaggtgcagttcctgtcattgacagttcatcccgtcatgcaccaagcttgcagagttccacagaggcttcttcaataactagatccactgaaagccacatcactgatactcatagtagagagtcttctctggaagttggtgatagcatatatgaccatctttgtcatttaataggtccagtagaacttgcagattcagcttttgaacaaatccagtacattgaccttgaaggagatgatgatcttctttccaccctgaaagaatattttaaggaaaaccaggaaaatcatagtaaaaatgagacagggaaagacccagcttctcaggaagtgactattgcagtaaataggggtgaaagattatccttagataaattagaatgcacagatcaggaaactgaatcagaaaatatcacctcttttgttgggactcctgaaaacctacagtttcagaaagaaccaaactcagctgtcttcatgagtaatatcgcacctaaccagtcagacagtttttttagaacacaaacttctgaaaaatctaagcaactaaacactgataaacagccatcagagcctagtttagatagcccttgtgataaagaaaaaaggaaacatctgtacagacaagcagccacagaattagatgcttgtgttgatgtaacactagttgaaaagcttaagagtgtgcaaattaatgaaaaaatcactgtcccacatgttatgcgtgccaagaaagcaacactaaaagcacctgttaaccgcagaatgcctcatgttacaagtactagcaaactttctccaactaaaaggagcttgtctgaaacagtaactcatagagccaaaatcatgaaaattgctactaaaaaacgaaatagtgttcatgttacttttaggccatccactgagtccgttcagttttataatcctctggaaaacaaagaggctccatggaagatgagactgcggaagctcggtggctttagtagtggtagcagcaatagcagcactagcaacacccataccagcacaaatagtgctacagagctagtaaaacctggtgtgtacagacctctagatacacttggtactgcatcagtaagcagcaaaacagtgaaggaatccacagagattcccaccaccatattacaaaaagaaggaattgcaagtagtcaattaggtagtcgtagtactcttaggtcatcaagtcatgaggcaggactacagcagggctccctgggtggcgtttataaaactgttgtacatgctctttcgaagccgaaggcaaatgtttccccacagaggcagaacagaatgccaccagaggctccactgagggatctgtacagtcatgtaatgggctattttggaaggaaagctgcagtcaataaagaggacatgagccaaaaactgcctcctcttaatagtgatattggcggcagcagtgctaatgttcctgatctgatggatgagtttatagcagaacgacttcgaagtggtaatgcctcgactatgacaagaagaggaagtagtccaggcagcctggaaattcccaaagacctccctgatattctaaacaagcagaaccagatgcgccctattgatgacccaggtgtgccctcagaatggacttctcctgccagtgcagggagcagtgatcttatcagctcagatagtcattcggattctttcagcgctttccaatatgatggccgaaaatttgacaattttggctttggaaccgacactggggttacgtcctctgctgatgtggattcaggttctggccatcatcagagtgctgaagagcaggaagtggctagtctaactactcttcatatagattctgaaacaagcagtcttaatcagcaagctttctctgctgaagttgcaactattactggttcagaaagtgcttccccagtccactcacctctgggctccaggtcacagactccttccccttctacattgaatatagatcacatggaacagaaggatctgcagctcgacgagaagctccaccactctgttcttcagacaccagatgatctagaaattagtgaatttccatcagaatgttgtagtgtgatggcaggaggtactctgactggatggcatgctgatgttgctactgtaatgtggcgaagaatgctaggcattttgggagatgtaaattcaatcatggatcctgaaatacatgctcaagtttttgattacctctgtgaactttggcagaatctagctaagattagagataaccttggcatttcaactgataacctgacctccccttctccaccagttttaattcctccactgagaattcttacaccttggctttttaaggcaaccatgttgactgataaatataaacaaggtaaattacatgcatataaacttatttgtaatacaatgaaaagaagacaagatgtttctccaaatagagattttctaacacatttctacaatataatgcattgtggattacttcatattgaccaggatattgtcaatacaatcatcaaacactgctcacctcaatttttttcacttggtttgcctggtgccacaatgcttattatggattttattgtagcagctggtagagtggcttcttcagcttttctcaatgcaccaagagtagaagcacaagttcttctgggatctttggtttgctttcccaacttatattgtgaactgccttctcttcatcccaacattcctgatgttgctgtgtctcagtttacagatgttaagtccacacaattgttaaagaacattagccatatcctccagacacaaaggcttgaatgttcatttggagcatatccttttttgtgtttaaaactgctttagaacctttttcttgttattgaacctactcacatgtctacctgttaggattcattcacttactgaacatttattgaaataccccatgagccagatactatgctactaatgtaaagcttctgagattaagatggtaaagtaaacctgcatattagactctctccttctcccagtttctcagtgtgatgagtcaaacatagtaatggaaaactctgtactgctctaggaaactatggagttgggatggagatcccatgtaccagaggcatttaggggcttgaacagtagatggtgcaaaataaatgtgactatacagttgccagtggaacttaccacagatattaatccttaaaaaaaagacaattgtgtccagttaggagaagacataccagatcacccttgttgtttataagtcttcaaaatgttttctggtagaaaagcagtcagtgctctgagcccagcaaggtgcctgttgataaataattccatcaataagttaagacctgtgtcttactgagacctgtccttacttaactgaatgcctatgtatgataaattcccagctgggcgcagtggctcacacctgtaatcccagcactttgggaggccgaggcgggcagatcacgaggtcaggagattgagaccatcctggctaacacggtgaaaccctatctctactaaaaatacaaaaaaaa

SEQ ID NO: 772 - DNA, 4564 bp, Homo sapiens
cctcctggagcttgcagtctagcgggcaaccgacgcacgggcattgcgcacgccccagacagtcctggagagatgcgcctggcagcggagacagagtggggacagtaggcggctttacccctggctaggaatgacacaagggcgtctgtaccctttgggatgggcgacccagccgagggtgactttctctttgatcttgtatgtcaaaaaacgaagcctggcatttctcactttgatcgacgccgtgcagctggcggctgaatcgctttgaaatgattgcaatgtgaaataatgtctggttgtggcgctagtgttttgaagagattgggcaactggtagtctttgagaacctttagggttcagaagctcggcgtggatctggcaggcatctttgtcaaactggcctcacctgtgatgagttcgtaggcatttatgtctcagaatgcattttaacctgaggtttttgttaacagaaatgcgttcttctaaaatgctcttttttcttggagtttatcatatgcagttatctccgtgtcttaattagaatcaatactgttgccctaaagtcgaatgtattagctctttaatacttgccgttatcttttagggttaggtttggtctgtgagctatctgtccattcctacccgatcaccagcaggtggcagtcccttctgactttaaatatagggtgtgctatctttgccagtttttgttttgttttgtttgtttgtttgtttgtttttaaatagagatggtgtcagaggcgtgtgaactagaacaactccatcttaaacaggagctgggtaaaatgaggctgaaacctactgggctgcattcccagacagttaaggcattctaagtcacaggatgagacaagtcagcacaaaatacaggtcatgaagaccttgctgataaaacaggttgcagtaaagaagccggccaaaactgaaatggccacaagagtgacccctggtcatcctcactgctacactcccatcagcgccatttacaaatcccatggcaatgtcaggaagttaccctatatggtctaaaaaggggaggcgtgattaatccaccccttgtttagcctatcattgagaaataacagtaaaaaggggtaaccagcagcccttggggctgctctgtctatggagtagccgttctttttattcctttactttcttcataatgttacttttacatcgcactgtggacttgccctgaattatttcttgcgcgagatccaagaaccctcagttggggcctggatcaggacgcctgtcctgtaacatatttctggcgaccacaaagggactatagtgcagaaaccctgacccaacggctacctttgggtaagtgttggggtcctgtaacgtatttgtggtggccacagaagcgactatactgcggaaacccagtatttatgtttaggagtctctcctaagacagtgggttcgaggcccctcttaataaaaggcaaggacgcttaagcttgactgaccttgggttggaggcccttctaagatatagggagttagagtccctctcaggtaactccctctcagctaagaacaggtttggcactatgggatattaactgctgttctctttggattaatctgccttgcgctctttgctgatggctgtgggtgacagagttaggcatgaacaggatcgtgggacatggggagctttttcctctctaaaaggggagtcttttttttttttaatttaagttttagggtacatgtgcacattttgcaggttagttacatatgtatacatgtgccatgctggtgcacttcacccactaactcgtcatctagcattaggtatatctcccaatgctatccctcccccctccccccataaaaggggaatcttgagagctgatgggactgctggaaaaggtccctttgctgcgtacaagcggctgcctgaggttttcattgtcggctgcaatgagtgggtcttttctctggcctccctaagctcttcagcttccccaccctgccacaggcaatacttttcttatctactttgcgtttcttattttttctattactcagggcaaccatcttacctagaggccacatgttgaaactccaagtcggaggttgaattaaagatgacaggcccatctgggggcaaatttaagccttgctagtttgatattgggtgctaagcggagtggctaatgtctttgttttatcacacgtattttgctctggccagaatggaaaaaacataattttcctttatgatacggcttggcccccagggcaatgatgctgcaagcttgaacactaggaccactaagggaaagggaacccagaagcctgggatgctggcaaaaggttgattatggaagattcccacaagagtaccacgtcagagacagcacctcaacctggttcagcagttcagggagctcacatttctcatattgctcaacaggtatcatctttatcagaaagtgaggagtcccaggactcatccgacagcataggctcctcacagaaagcccacgggatcctagcacggcgcccatcttacagaaaaattttgaaagacttatcttctgaagatacacggggcagaaaaggagacggagaaaattctggagtttctgctgctgtcacttctatgtctgttccaactcccatctatcagactagcagcggacagtacattgccattgccccaaatggagccttacagttggcaagtccaggcacagatggagtacagggacttcagacattaaccatgacaaattcaggcagtactcagcaaggtacaactattcttcagtatgcacagacctctgatggacagcagatacttgtgcccagcaatcaggtggtcgtacaaactgcatcaggagatatgcaaacatatcagatccgaactacaccttcagctacttctctgccacaaactgtggtgatgacatctcctgtgactctcacctctcagacaactaagacagatgacccccaattgaaaagagaaataaggttaatgaaaaacagagaagctgctcgagaatgtcgcagaaagaagaaagaatatgtgaaatgcctggaaaaccgagttgcagtcctggaaaatcaaaataaaactctaatagaagagttaaaaactttgaaggatctttattccaataaaagtgtttgattcctaagaaagaaaatatttttgtggacatgcataaaaattaaatggatttcctagtggagttttataaattaaaaggtcaaaactgaagctttttatttaggcttttccaaatcaaggataaatatcttacgcacgatatctagtgacagaggagaaagtggaaaatgacctcaaggaagctacgggcacaactggaagctttgtagaaattaaacatattcaaggagcaagaaatgaactttcagcagtctaaattttctaaataaccaatagttgccaatctaaaatggcagagaagatgaaatttgataaactgaattttttttaaaaatccatttaccctacaggtttgcatttgtttgctgaaatttacctttttttagttatatatatgtgtgtgtgtgtgtgtaatttctgccaataaattctaaattacaaaggtaagagaaaacctagtacattactaaatatataaagtatatgttctgattatgtatacttgttctagtgtcaagtctttttaagtgggtttttaaaagtttgttattggacttgaatggatttttgagactaggttaattatttttgaggtcttatcctaaaaggcatctaaggtacatgaatggagtatggtgattttataacattttttatcagaatggaaaaagaactgtttaaaagtttgatacttttaaatagttggtttttttgcttactctggtaatgattttctacaaatacataataaattgtttttttgagtctatattctgtatgcagttgaatatccattacttattctgctgtgctttaatagaatggaatgtttacaggcccttaaaatattatttttaaaaaaccttctgaagatacataccaaagtttttccaagaagattttataatcaatttaataatgtaaggtttatcagattctataatagtatagttattaaggcaattttatgttagagactattttgtaatgtagtgagtggtacctttataagaaaagtgactgccaatatatttttatagctgatctttataaattctaatgttgagtttttaatgattattttaaatgtttatatagtttagtaaaatttgcatctcaaagtatcatttttatattatgggacgttttcagattggctaatatttgcattgtaaattttgtatgcagtttatctaaaattcaaaaatactgtcagtacaccagcgtttaacatctatattccaatttgtatacagtttaaaattgtactgcaaaactattgtgtgctcttacacagtatgcatcatattgttgtctgtgaaattaaaggacatttgatagtctactgaatgtaaaatataatgcttggtatatgaatgataa

SEQ ID NO: 773 - DNA, 3063 bp, Homo sapiens
ttcaccaaggagaaaggcaacccgtgtcggggagggagccgatcgctaggcaacctggagtttgttaccctggtaacggatccatgcactgatgatgctgcggatggacatcttgtgacaatggcctctcaggctccccagacgcatcagcggctctggattcccaccttgcgcccagcgtggttttcctgtgtggctaccatttaacgaacagcttggatttcttataatcaggcactctctccgataaccatcctgccagcacccctgaaagtgaagttggggtgttcctcactgtgtgtgggcgaccgcctggggcatgagaccaggacttccaggccccacagggttgtgcgctcagacctcaagtaggggccagaagagtgtactgaaacagaaggaatcttgtggaatttggcagttgtaccattttcttagcagaaaacaggagcccaggtgggagccatgtgtgtcgggttcctcgtcaggtgacggtgctgttgcggatctcgcggatgagctgagggggtatccagctttgtgctgcacgcttcctgtccactcatacaggtcgtgggctggtatccgcccccagatcatgaacggccccctgcacccccgccccctggtggcgctgctggacggccgcgactgcactgtggagatgcccatcctgaaggacctggccactgtggccttctgtgacgcgcagtcgacgcaggaaatccacgagaaggttctaaacgaagccgtgggcgccatgatgtaccacaccatcaccctcaccagggaggacctggagaagttcaaggccctgagagtgatcgtgcggataggcagtggctatgacaacgtggacatcaaggctgccggcgagctcggaattgccgtgtgcaacatcccgtctgcagccgtggaagagacagcggactctaccatctgccacatcctcaacctgtaccggaggaacacgtggctgtaccaggcactgcgggaaggcacgcgggttcagagcgtggagcagatccgcgaggtggcctcgggagcggcccgcatccgtggggagacgctgggcctcattggctttggtcgcacggggcaggcggttgcagttcgagccaaggcctttggattcagcgtcatattttatgacccctacttgcaggatgggatcgagcggtccctgggcgtgcagagggtctacaccctgcaggatttgctgtatcagagcgactgcgtctccttgcactgcaatctcaacgaacataaccaccacctcatcaatgactttaccataaagcagatgaggcagggagcattccttgtgaacgcagcccgtggcggcctggtggacgagaaagccttagcacaagccctcaaggagggcaggatacgaggggcagccctcgacgtgcatgagtcagagcccttcagctttgctcagggtccgttgaaagatgccccgaatctcatctgcactcctcacactgcctggtacagtgagcaggcgtcactggagatgagggaggcagctgccaccgagatccgccgagccatcacaggtcgcatcccagaaagcttaagaaattgtgtgaacaaggaattctttgtcacatcagcgccttggtcagtaatagaccagcaagcaattcatcctgagctcaatggtgccacatacagatatccgccaggcatcgtgggtgtggctccaggaggacttcctgcagccatggaagggatcatccctggaggcatcccagtgactcacaacctcccgacagtggcacatccttcccaagcgccctctcccaaccagcccacaaaacacggggacaatcgagagcaccccaacgagcaatagcagagaatgccagaaggtaatcactcagatacacttgggaccaagagacagtgaaaaatagatgaactaagagaaaaagaatcggatggtctttgtaactgattctggacatatgcatcattgatgttgcagtgttgaaactacaagagctagaaaactgaagatgtcgtctgcttacggaagcgctgaaagactaggatgtgatttattaacgaccaacttctgttattgtgtgttaagtttttcatctgtgcatcaaatcacaaaaagaataaatagagctttttcctttatcagtcccttgggcacagcaggtcctgaacaccctgctctacaatgttgcatcaagagttcaaacaacaaaataaaaaatattaagaggaaatccccatcctgtgacttgagtcccttaagtctacaggggctggtgacctctttttgctaataggaaaatcacattactacaaaatggggagaaaactgtttgcctgtggtagacacctgcacgcataggattgaagacagtacaggctgctgtacagagaagcgcctctcacatctgaactgcatactgagcgggcaagtcggttgtaagttcagtaaaaccctctgatgatgcaaaaaaaaaaaaaaaagtattaagtttcacaagctgtttgtactcaaatatattttctcagtttcagatcctctgctattttattgagtggaaagtcttgagctaaaagggttcaagaagaataatgttgcatttccttatgtctcaggaaacactttttatggtaacttgtcagattgtctatgaacaaacccacttttttagacattgataaagtcttcttttcttcacgtgatattttatacaagaacacttcagatgtattagatgtgactgattttaacaaatcctattagatttgtatcaactagttacatgttctattcatagtcttttgtgaatcattgcctttttgtttaaaaagatggcctattttgagcctttgtataggtacattcctgtttttgtgacaaaagaaaaactttaaaattgtcccaaacagaaaaataatggctatcagaagtatgttttgttttagtgtgagttaccgttactgtatttgtttattgtaaaggtggacatttagcgttcagtgcagttttcaataaaaagtaattaaaatttgttaagttctgaaattcaa

SEQ ID NO: 774 - DNA, 3596 bp, Homo sapiens
tgagccatgatcgcaccactacactccagcctggcaacagagtgagaccctgtctctctttaaaaaaaggagggcctatttcccagcttgttttatgaggcaatataatccaataccaaaacctgacaaagacacctaaaaaaaattatagaccactatccttcatgaacacaggcaaaaatccttacgaaggtattggcaggtgaaatccaacaatagcctaagagggcagtacacctcggccaagtgtggtttatcctagtgatacaaggttgttttgattcataaatgaatctttgtcgtcaccatattactagaataaagaaggaaaggatgatcactgaaatagatgcagaaaagacatttggaaacatttatacctgttttatgatttttttaaaaaaacctcagtaaactaagaatagaaggaaactccctgagtctgataaatgaacatctatgaaaaacctacactagacgttgtacttttgatggcgaaatattgagcattttatccctaaaatcaagaacaaggatgacacccattctcactcttctgtccaacattatactcaaagtcccagccactgcaataaggtaagaaaaaaggcaaattgaagtcacaaggattagaaaggaagaagtaaactgtatttatttgtagatgacatgattatttatgcagagggtcctaagaaagctacagagaattgctagaactattaagtgaatttagcaagatttcagatatcaaggctaaggtgcaaagtttatcgttatatagtagcagcaaactatcggaacatgaaatcagaaattacattctatttgtaataacaaaaagtaaaatcttagtaattatcttaacaaaagatatacaagacctgttcactgaaaactataaacactgctgagataaattgaagaagatgcggagggatgaagagagacagcatgtccgtgatgaaaagactcaatcctgttaaaacatcggctctgccagtcaaaatcgcagcaggcttttttgtaggaattgacacaatgagtctaaaatggaaacacatgtgacctggaattgccaaagcaattaatcaaagtggagctgatacgtgccctgatttcaaagtttctattctacttacagcttcagtaatccagtcagccgcagtgtccctgaagaatagacacacaggactgggccggggtctgcagggctcagctgagcccatgagctcccagagctaacccctgaacacccaggcgggcaaagggctgatgtcggtagtccccatcctggaggggcagccccactccatctctttggctccgcatgctcctccctgtggcaggctctgcgcatctgctcctggcatggcgctgcggcacctcgccctcctggctggccttctcgtgggagtcgccagcaagtccatggagaacacggtcacgagaaacagcacagctgtgatcaacacacaagctgagggtaccctgagccccccaggcctgtccagtctgcctgtggtcagggaatgggccctcacacacaccgcccagctgcccgagtgctgtgtggatgtggtgggcgtcaacgccagctgcccaggcgcaagtctgtgtggtccaggctgttacaggcgctggaacgcggacgggagcgccagctgcgtccgctgtgggaacggaaccctcccagcctacaacggctccgagtgtagaagctttgctggcccgggtgcgccattccccatgaacagaagctcagggacccccgggcggccacatcctggggctccgcgcgtggccgcctccctcttcctgggcacgttcttcattagctccggcctcatcctctccgtagctgggttcttctacctcaagcgctccagtaaactccccagggcctgctacagaagaaacaaagctccggccctgcagcctggcgaagccgctgcaatgatccccccgccacagtcctcaggtaacagcagctgtcgcatccccctgtggggtttcccatctctgggccagtcccagggtgctctgtgggtttgtccccaaacgggtttgcctggctctggatctcggccacccctgcccgggtccccaggagacccacccacaaggcagggccagggccggatttggctggtgccccctgctctggatctcagctggatttggccggcgccccctgcccgcccccctttaatccccgtgacttccatgctctttcctgttcccgagacgtggggtctgcaggaaaggaggacccaccacgacagggcagacccccaatacctgctcctccttgaagtccagctccacccgaggacagacgcagccggcctccgccaggccctcctgagcagccatcgcttcagtggtgctgggtcaggcggacccaagagtcagcccgtacggaagccgcgctacgtcaggcgggagcggcccctggacagggccacggatcccgctgccttcccgggggaggcccgtatcagcaatgtctgacctggaggccgagaccacgccacgcacttggcggcagggacccggaggccgaccccttggcgggaaccagcacaaagtgttggcatcgcccggcgcccgggacagtcctgggcacagcctcggctctgagtccctccgcctcccagcgacggacgccaaagggtcccgggccgcctgaggctcctccccaccacagccatctcgtttatcggaccaggagcaggcatccatgagacctcagagcttcagatcgaggccttggggggtccgggcccccccaggaaacacggtgaggccccagcgcctgcagccaaagctggcacgatctatggggcaggtgccgctctgcctagaaaagccaggggctctgctgccgtgccctccagagcccacagcgggcaggactcctccagcaccaccacacccagtggcccgagacccctctgagaacagtgaggctggtcctcgtgccgttccagccggtgcccggccagtggggaggacacagcctaggaaccagctgcctgagaccagggtgcctctgggctgtcctcccgcgtggcggagaccccaagcacgcagccacccatttccggagctgcaggatagagcttcctcttgatctctgtttttaagcagaaattcattgtgcagaaaagtcctccagagctctgtggccccgctcggatccgctggacccccatgcctggctgatccctgcccacgtggggcaggcccacatctaacccccacaagtcactgcctcactgcacctgccaaggctgccctggcgctgagtcctggggtccctcccggagttcctgggagaaaggcgccgtcgtggccgcctcccgcacgccaggcccgggctccaccgtgggtctcagacgccctgcggcaccggcaccgtctgctttagcatgggacccccctctgaggggtggcctggccttcggggtccccacgctcctttgcgaagtccactgtgggtgccatcatggtctccgggacctgggccagcgggaacgtgggggcactgggtgtgctgatataaagtcggcattactcaagctgcgttccga

SEQ ID NO: 775 - DNA, 1912 bp, Homo sapiens
gcagcggcggtgggaggagtgggggacctggagggaggtggtgaaatagaatggtcctgggggacgggactccaggggtttgacgattaggcgtcaagactgacttagacctgggaagaaaaccagaggcagtcgagcagagaggccaaacgccaggcagggcgaagtcagccggagatggagtggaaactggagcgcaccgcgcctcggagggtccgcacggaagaggagatgctgtgggaaagtatcatgcgtgtgctctccaaagacttgaagcagaagagaagtcaagattccgccaacgtactcgattcagttaatgctacgtattctgactttaagagcaactttgcgaagaggctgtccgcagaggttcctgttgcgagtagccccattaccacaaggtggcagcaaagtcaaactagggctctgtcctctgattcctttggggaagagcagtcaaccacctacctcccagaagcttccggatcagtgctgaagacaccgcctgagaaagagaccttgactctaggatcccgcaaagaacaactgaagacccccagcaaaggaatttctgaaacaagtaactctgctctccatttttgcaaggcacctcatgcaatggacagagactggaaagaaagtgttgcctcaaaagggcagaaatgcctaaaacaactctttgtaacccagaacgtggttcagcaggctaatggaaaaatgcagctctgtgagcaatccgaatgtgtttggaaagatcactttagtggcagcatgaagaaacgatttgaacaggaggatgttggtggcaaagactaattgagaggccctctgaatactctatgcaaggctctgttgttgattcttttaagggaacttaaactatgaaacagatcccacataagccaagtaattgctcatcagtggatcacggggacaaatgttatccaaatgctgtgtatataaagcaattctttatgccttgtccatatctaatgactctgaaaccttacagcaggcagcccctgtaaactttcaggtgtacctctttgccgaaagctggtaggaaactttggatggtggtgttgtgagcgttatcagggaagctctgtagccatgcagtggggagataattgcctgtggcaatttctagaaggtcctgttccatgctacatttggagctctcagtgctttctttcttttttttttttttttttgagacagagtctcgctctgttgcccaagctggagtgcagtggcgcgatctcagttcactgcaacctctgtctcccgggttcaagcgattctcctgtctcagcttgggattacaggcacacaccaccatgcccagctaatttttgtatttttagtagagaaggggtttcaccatgttggccagactggtctccaactcctgacctcagatgctccacccgcctcagccttccaaaatactgagattataggcatgagccactgtgcttggcctcccaaagtcttttgaccctgagccccatgtgttttcattcctactttctgttgccatcatggacgtttttgtgttattcatgagattattgtcatggctggaaaataattgtttgggagccagaattctgtgtgagaatcctcttgagagaactagcgtggttcatttcataaatgccaaggaaacttgcctgctacatttcccctctggaataagttctggtaagcatatccatggggtgctttggcaaggtctcaaaaataaatgtgaacaaggagacagaaatcctcaatgctaaagtagacttctatttttatggcttgtcctattttttttttttttttttgagatgaagtcttgctctatcgtccaggctggagtgcagtagtgtgatcttggctcatggcaacctccacctcccgg

SEQ ID NO: 776 - DNA, 5569 bp, Homo sapiens
ggttgcagtgagccaagatggcggcgttgcactccagcctggatgacagctccatctcaaaaagaaaaagaaaaaaaagaaaaaagagaatatatcatcatactttatttttttaaggtatttttgctgggtagaatattcgatgttgaaaatgtgtttcctttgatcactttaataatattcctctattgttttcttactttgattgtttttttgaaaatgtggctatcagttatattgctgcttctttgaaagttatgtcttatttcttttctctggctgcttttacgatttcctttttgtttttgttctctagcagtttgactgtgacatgcttgagtgtggtttgctttgtatttattctgcttggggtttacagagcatcttgaactgtggcttccatcagttttggaaaattttgatcatttcttcaaatactgtatctgtactattctctcctctctttctgggactccaattacacatatgttagatcttttccctctgtcccctgtgtctcctttgctcttttctgtattttccatgcctttttccatttatccttcagtcttgcaggtttagaggagatgacttatctcctctgtacctatacattgagaaatggacacctacagaagtgagactttaatggatagaggaggcactagagaagacttgccagaaggagttgagcactgctttgtgcatagctctgtggtggttcctggggccttcacacaggaacttacaatccacatcattaaggcagaaggggagagaggaaaaggggagagaggaagacaggaaacaaaaagtaaagaaagaggaagcaataatattatttgattctgtgtagaaaggattttgaaatttgacctgtgaaaacaaggagatgctcatatgagaaaaagcaggtcagtgggccaggaatgaagagtagagggaatggacctttgggtatcctattatttttaaaaggtaaaaggttgggggtcccttactcccagaaaaatactttgcttttaaatatagcttatgagactctattgggtttcctaagaggtaaggtaactctcttatgttagaaaacaggcattgcttaggctgttggctcttgttgcttaatttcccaaagatgccagtacacttcggatactgttaatacaccagcagcaaagctctctctgggaccattgtgccccatccccccaaacttttgtgtccctcatctcagtggtaaaatttaaaacaaacattgggtgaatgggcttggggtggttatttttaaaattttgcatgtaaggacatttaaaacaaagcaccactttataccatcactttatttatcttttcaaaaggacattttaacagtgcaaaagtataaagtacgtgctttaagacagaggagaataaatggaataacttagttttgtgaaagactcacagtatcacttggtttctggacacggttcgagacctggctgtggcttgctgtggccttgagagccatcccacagcagcaatgctgttggaccctttggctgggaccttcaggaccccctgcaacagcactgtgtgccctaacctgctggcatgatgcccctttgttgacagggctgcatacaaggccagcgacaagtggcaggcagtgacgccagcctgatttgctgagggcacacgccatgcttcctgcagtgccagtgctcttctgggtccactttgcagcaggatagatgtgttctagatccaagagttctgcaccctcagcaggggtgcgggagtgtagttttttgccttctcaggagcctccttggaaaggggcttttctgtgtatttcaggagctctgtgttggagatgagagaggttcttattctctcctgttacagatgaggaagctgagccaagaagaagcatatggcccagggccatatggttatttgtgacatccctgggactagagcccaggcctctgtggtgtgtgtggaagtctgagcctggccaggctctgtaattaggccccagaggggctatagggcttcccttcccccaccagtccagttctgggaacagagggacagatcctgagaacctgtgagagcagccgctaggaactcctctcgccttcccgtgccccttcctgccatgctgggggctgcagccccctccccaggccccctgtcctcccctgaggctgggggcagctggaggatgccaggtggtgatagagaaagactgaacactggggattcaggaacaccttgaagcaaagggaagcctcctgggctgctgcattttctgtggggatttcttgtctattagatgaggattgttggatgcctcagtaaaagctgggcttagcgcagcgcctggtttatagtttgctgctgtttagctgtatctttaccccttgctggtagagaaactcccccgagcccttctctgtaaacaggcctagtttctggcaggtaaagccaaagccccaaggaactttacttactcacccctgcccttaagcacttttcacccagcctgctaggaagggccctgtttgttggaagttgtttgatgttttgctttttttaacctcctggtgtccatctgggcagaagccgagtgactgcccacaggagggccctgtttggctctgatgacctcctagagggacttttgggaggatggggccttgtgggggactgggctccagaagtcataggaggttggcctgcagcctgtgttcctgcctgggggagagcctgcccctccctcccctgtcattccttcattgcataacttctctcggagaaacatgtcagaagctttcctggaacaggccaggagggaagcaaggctgctcacagtggctttagagcctggagcttgtgctggggctggttttcctccaggacgaccttgctggccacgtgggccaagccgggggcgctcttagaatgtggatctgagcagggagaggtccttgccagtggagagctgtgtgcctgaaagtggccagagaacagtttgaggggggtcctgatggagggtgatgagggggacacacctctgcctgcagaaggaggagctcaatgtggcccaccctacagctgtggcatctccggtaacctgtggatccacctgcccctctcgtgggcttgtctctggacttgcttcaggcagagaagaatccagacacagagagacattggtgaaggtcactgcagtgcacaggctaatgttgcctgtctccgtttatttcgctaagtcagatcgtgtgctcgagtgctggcagggcagaggtgggcaggcatcagggagttaatgtttaaacggggactgtgtctcccagctctgagcccagggctttctacagcgagagaaagagctgatgtacctgccaggcacccccatcccaacacagcagacatctgtaccatgtgtgttgtcactcctgagggccaggaggctcagcttatcctgccccatgctgcccagtacggagccgccagccgcacggggccttggaaatgcggctggtccacagtgggatgtgctgagtataaaacacacatggtgtttggagactttgtgcacacacacaagtgcaaaatatctctaataatatttattttgattacttgttgaaatgataacattttgggtatattaagtaaattatactattagaattcattttgcatgtttcttcttgcctttttcagtgtggctgctagaaaagtaacaattatatgtgtggcttgccttctatttcttttgttctgcgccggcccagcctttttgaatagagtcacgagaacaacagcagctgcttgtgtggcctttgtgtgttcctggcccggcgagtgctctactcacgcccgcacgacagcctgtgaggcaggggctgcccagactgctggggacgtggagggtgcactgttgcccaggtgtgggtaaaaatgtatcgcaaaaacatttttttaaaaattgagttgtcttctttttagttttaaaatgtacttttcattaaattttcaacaagttctgtatttttcataaaagtcatgcataatcactgtagagaatttggaaacatgcaagcagatgccagtttccttgcgccttaaacagagcgtcctggtgtgagccctctcccccaacagccccctgctgcgatgttgcctggctgccgggcagtggggctgtggcgctgcgatgttgtctgactgcggggctgtgggactgcgatgttgcctggctgtggggctgcgggactgcggggctgtgggactgcgatgttgcctggctgcggggctgcgggactgcggggctgtgggactgcgatgttgcctggctgcggggctgtgggactgcggggctgtgggactgcgatgttgcctggctgcggggctgcagggctgcgggactgcggggctgtgggactgcgatgttgccgggctgcggggctgcgggactgcggggctgtgggactgcgatgttgcctggctgcggggctgtgggactgcggggctgtgggactgcgatgttgcctggcttcggggctgcggggctgcggggctgcgatgttgcccgggtgcggggtgcggggctctccgaggccggctcatcgtgcggccgctctggtctcagccctgccggccatggtcaccgtgcccagccaggtgctcttcaccctctttctgctcacccatgcctacccggaaagccagctacagctgggtataaaggaagagaatactggccctgggtgaggtgtggcattagtggcaccttctgggctcctgggcaggggtggggagtggctttcttgagcagctgggatcattcattgactgatttttggataaatgaggtgttagtggaccttgattcggaagattgtgaaagaggataatgggaaggcctggcaccccacggtcctcagatgtcagtgtttgccagccccgcagaaagggcaaggtgggcgagagggccttccattacccagcgagggctgcgcctgagccccgcgagttcccctggcttggattagggggagccaaaagtgttctcactctcaccaccaagtgctttgtatgcctgtggcaacacctttcctgttccagtgaattagggaagtctaggtgatgggaggctcttcagacagacctgaagcgggtggttgtgttctcagggtgccctgtgtggtcggggtgacgttggtctgtggaccatccctggtccgtcttcccatttgtgctgggtccttcccaggtgcttcccagctggcattactttggggtgtccgtgtgcccgtgagcctgtgaattatcaaaggtgatggtgtggagtgggggattcctgaatctttttcactgaaacacctacctcgagccaaatgttctcttaaaacaacaggtggcatctcccaccttgttccccacttttcaaaatgctggtgtggcagcgagggcccctggtgcaagcggtgtctgtgtggtgctgccccaggccttgtgggtgggcgagcgggtggccccagccctgcgtgagcactgagtgcccgccccctcc

SEQ ID NO: 777 - DNA, 2593 bp, Homo sapiens
taggcgggagagcgcggccatggcggggccgggcgtccccggtgcccccgcagcgcgctggaaacgccacatcgtgcggcagctgcggcttcgggaccgtacgcaaaaggcgcttttcctggagctggtgccggcctataaccatctcttagagaaggctgagctgctggacaagttctcaaagaagctgcagccggagccaaacagtgtcactcccaccacccaccagggcccctgggaggagtcagagcttgactcagaccaagtcccatcactggtcgcactgagggtgaagtggcaggaggaggaggaggggctccggctggtctgtggtgagtgagagtggcagtaccagcctcctggtgtggtgaggatggaaggagcgtgtagcctgctgggaacatcatggcgcccgagggccggatgggcatttggcagcctctgcgcgaggagtcctcgcagtggttatgcatggtgctgggagcggagcgctggcttcccactcttcaggcgaggcagtggagcgggttgctcttgccagagaggttcctagtagggtcgcagagaaacgaagcggcacggcgaggattgggacccagggctgactccagagcccgagggccttccactgctccacaaacagcagcgcgtccctgtgcaaggtcccaaacctgtgtggggctcagcttgcttttcaggaagggggcgggcaggtgagcagccgactcccttagcgccttcggccccggagggactggaggcctggaggggcctcagcgccgccgtgcccacctgtccgcccccagatggcctaccaggtggtggagaagggcgcggccctgggcacgctggagtcggagctgcagcagaggcaaagcaggctggcagccctggaggcccgcgtggcgcagctgcgagaggcgcgggcgcagcaggcccagcaggtggaggagtggcgggcgcagaatgcggtgcagcgggcagcctacgaggcgctgcgcgcgcacgtcgggctccgggaggcggcactgcgcaggctccaggaagaggcgcgcgacctgctggagaggctcgtgcagcgcaaggcgcgcgccgcggccgagcgcaacctgcgcaacgagcgccgggagcgggccaagcaggcgcgggtgtcccaggagctgaagaaggctgccaagcggaccgtgagcatcagcgagggcccggacaccctaggcgatgggatgagggagagaagggagactctggctctggcccctgagccagagcccctggagaaggaagcttgtgagaagtggaagaggcccttcaggtctgcctcagccacctccctgacgctgtcccactgtgtggatgtggtgaaggggcttctggattttaagaagaggagaggtcactcaattgggggagcccctgagcagcgataccagatcatccctgtgtgtgtggctgcccgacttcctacccgggctcaggatgtgctggatgcccacctctctgaggtcaatgctgttcgttttggccccaacagcagcctcctggccactggaggggctgaccgcctgatccacctctggaatgttgtgggaagtcgcctggaggccaaccagaccctggagggagctggtggcagcatcaccagtgtggactttgacccctcgggctaccaggttttagcagcaacttacaaccaggctgcccagctctggaaggtgggggaggcacagtccaaggagacactgtctggacacaaggataaggtgacagctgccaaattcaagctaacgaggcaccaggcagtgactgggagccgcgaccggacagtgaaggagtgggacctcggccgtgcctattgctccaggaccatcaatgtcctttcctactgtaatgacgtggtgtgtggggaccatatcatcattagtggccacaatgaccagaagatccggttctgggacagcagggggccccactgcacccaggtcatccctgtgcagggccgggtcacctccctgagcctcagccacgaccaactgcacctgctcagctgttcccgagacaacacactcaaggtcatcgacctgcgtgtcagcaacatccgccaggtgttcagggccgatggcttcaagtgtggttctgactggaccaaagctgtgttcagcccggacagaagctatgcactggcaggctcctgtgatggggccctttacatctgggatgtggacaccgggaaactggagagcagactacagggaccccattgcgctgccgtcaacgccgtggcctggtgctactccgggagccacatggtgagcgtggaccagggcaggaaggttgtgctctggcagtagggccacgacctgcctgcctgggctggagctcttgcccgaagcctgaagcttccttcggcgccatgcaggggttggggttgggactggagctggccttgggatttaatggggaagaaggcctggcaggacctggcctgtttgtttaaaaatgaagtatgggttgggggattacgctagtttttctttgtatttttatctctatctcctcactttttctcccaaagtagaaaaaaatgatatctgaa

SEQ ID NO: 778 - DNA, 3548 bp, Homo sapiens
attttctctggggcaatagcagaataggagcaagccagcactagtcagctaactaagtgactcaaccaaggccttttttccttgttatctttgcagatacttcattttcttagcgtttctggagattacaacatcctgcggttccgtttctgggaactttactgatttatctcccccctcacacaaataagcattgattcctgcatttctgaagatctcaagatctggactactgttgaaaaaatttccagtgaggctcacttatgtctgtaaagatgggaaaaaaatacaagaacattgttctactaaaaggattagaggtcatcaatgattatcattttagaatggttaagtccttactgagcaacgatttaaaacttaatttaaaaatgagagaagagtatgacaaaattcagattgctgacttgatggaagaaaagttccgaggtgatgctggtttgggcaaactaataaaaattttcgaagatataccaacgcttgaagacctggctgaaactcttaaaaaagaaaagttaaaagtaaaaggaccagccctatcaagaaagaggaagaaggaagtggatgctacttcacctgcaccctccacaagcagcactgtcaaaactgaaggagcagaggcaactcctggagctcagaaaagaaaaaaatcaaccaaagaaaaggctggacccaaagggagtaaggtgtccgaggaacagactcagcctccctctcctgcaggagccggcatgtccacagccatgggccgttccccatctcccaagacctcattgtcagctccacccaacagttcttcaactgagaacccgaaaacagtggccaaatgtcaggtaactcccagaagaaatgttctccaaaaacgcccagtgatagtgaaggtactgagtacaacaaagccatttgaatatgagaccccagaaatggagaaaaaaataatgtttcatgctacagtggctacacagacacagttcttccatgtgaaggttttaaacaccagcttgaaggagaaattcaatggaaagaaaatcatcatcatatcagattatttggaatatgatagtctcctagaggtcaatgaagaatctactgtatctgaagctggtcctaaccaaacgtttgaggttccaaataaaatcatcaacagagcaaaggaaactctgaagattgatattcttcacaaacaagcttcaggaaatattgtatatggggtatttatgctacataagaaaacagtaaatcagaagaccacaatctacgaaattcaggatgatagaggaaaaatggatgtagtggggacaggacaatgtcacaatatcccctgtgaagaaggagataagctccaacttttctgctttcgacttagaaaaaagaaccagatgtcaaaactgatttcagaaatgcatagttttatccagataaagaaaaaaacaaacccgagaaacaatgaccccaagagcatgaagctaccccaggaacagcgtcagcttccatatccttcagaggccagcacaaccttccctgagagccatcttcggactcctcagatgccaccaacaactccatccagcagtttcttcaccaagaaaagtgaagacacaatctccaaaatgaatgacttcatgaggatgcagatactgaaggaagggagtcattttccaggaccgttcatgaccagcataggcccagctgagagccatccccacactcctcagatgcctccatcaacaccaagcagcagtttcttaaccacggaatcattctgctgctctgaaagctcaggatccaaggcagactcatccacctaaacatacaccacgtagtcatttcttctctgggatccagccatcttcacaggaggcctgcaaaaatggtgtctgaccaatcagtctgtgattcgcaacgtaagccgggaatccttgctcttatacatcacagcttctcccaagtagtttttctataatagagttctttctgactttaattcaaagccggaaacagactattacctttgatttatgctgttacgtatcctgaagtgaacagtacacaagggcataattcatgaacagggtagggtggaggaggatttattctgagggaaaacaaatgcttgcacttttaaaatattattcaaacaaagattataatttcatcatccaaactgggctactgtgatgacagtttaagatttcacttatttttaaaacattatatctcaagacaatcttgtcaataaaattacattgctacacatggcagatctgaagagaggggcttctctcctattatgcttcctatattacctccatacaagatttccatcagcaagggcatcataaagcatgaaatagctgttcatcagagcagacacgcaaacccctaatagatcgtggaaaaataatagcaacaaagatttatttattgagcatttactgagctctggactctaaaacccattctttgtgcacattacctaatttattctttataacaccatacaaaaatgctatggctagtcccacttcacatgtgagaaaactgagatgcaaagaaatcttcctcagggtcacacaaatagtattagagtcaggattcaaatgcagccttattgaacttaaaatgttaacatttaaaatgtgaacctttaatgagcatagactgaatccacagtaggtgtgcaaatgttaaacaattttgaaaatacagtgttttgtttggggtttatttccatagtccaggtgctcagtggtggtcagagactgttctaatcaagaagctgttctccatgtgagctcactacaagcagttcttttgtgtacctctctatcaacaattgccacttaaaaaattaggttactgaatggcaaaactgctaaaataatgtgccacattggccaaatagggtgaatattttttggacttccattagtttaattaaaggtagtcaaggtatgtgattttagagatattctccagtcttacttgaaaaatgtataaaaatatagctaatgggaatgctttaggtggaatattaaattgttctgaatacagctaaaaaccctgaaagattctgatagcctgatccacactgtagtgatcatagaaccttccctgaggaattgtgaatttgagagaatcttcctgttatggctacgatcagagatccctaaaggatggagatctgggtttcttgtatgctgaagagcacttgagagagactggtttgtgtatctaattgatgagaaaggcctagttaataaatgtccataaatgtagccaactttattgcaagccatgctgcccccaaaatagccctaagagttgtacctgaccaaataactcagtccagttttacaggatgtgaagactgagtattccatccccagacaatgcaatttcagttatctgagtttttaatcctgactgggatgagagaaggctgagtgatagaagtatctgaatatgtggtattattcctcctgcaactcagggaaaaacagagaaactggcaaagtgaacatcctatt

SEQ ID NO: 779 - DNA, 2279 bp, Homo sapiens
tttctccttagttctagggatagtattttacccccttgaaatagtgtgagaaggtcatgggtagaaggatcacacctgtgattcctaataggaatttctgtttccatgaggtttctcaaaagtagaatcgaggtcctttagcaattgtaagagtttttaaacacctatagaaatggtacatttgcataaagtaaagctgtagaactgaaaatgtccaacgtctttacttttggctggaattttacgagcctgattagctctgcatggcagcaatgggcatgttaattatatttgaaaattgccgtttgtttgtagacaaggagtccatgaggagagaaaatcaagtgaatgttcttgaactgtactgcagtgatggggaatgtccacaaggtggcgcaaagactttgtttaactgctggattcctagctagcacctggaatacttgaagcccctttcaccttctccctctttgcaaactatggctcagctgcatctgtgccctcagttctggtccccagcttcccctgaatccccttcgtgctgttatttgggctttgtattggtacctaaccacattctacctgtagtgaaagctgaaggtcttggttcccactctaggtggtaagtttcttgagtggaggcaccagctgcatatactttaaagcatattcttttctgtatttccagcaatgccaggcacaggacctctgagttgcattgttgaattaacatcttttggttatttgtgagttaattgtggacttccatagggttctccctcagtatatttttggctttgaagagtatgtttatcttcccagctgcataaatgaatttttggggtgaaatggggattttatgtttgtagtacatagtttcatagactttacaccacaccccgaccaaccactttcagtaacttcgaagacagttggttatggaaatcattcccgtgcacgggtcttccctgaagctctgcaattggtcttggcagtgggaccttcatgtgtgacagacagcagatggccatggagttcccaggctgtgtgccatgtgattggcgaggacaacgtggcagtcccctcacacctttataaggtaatcctggcccgcagaagctcagtatctaccgaaccactggcgctaggggcctttgtggtacccaatgaagccatcggcttccagccccagttaactgaattccaagtgagcctccaggacctagagaagttgtcaggactggtgttttttcctcatttggatagaactagtgatatccggaatatctgctctgtggacacctgtaagctcctggatttccaggagttcaccttgtacttgagtacaagaaagattgaaggagcccgatcagtgctcagactggaaaagatcatggaaaacttgaagaatgcagagattgaaccagatgattactttatgagtcgctatgagaagaagctagaagaactcaaagctaaggagcagtcaggaacccagataagaaagccatcctagtttttatctcaagatgtgtcataccgtctgtaatgaagcaggcatgccctctttaggctaacatattttagtggctttgctttttgctttttaaaaagtttttctctttaagagatgtggtctcgccgtgtcatccaggctggagtgcagtggtggaatcatagctcactatagcctcaaacttctgggcttaagcaatcctcctgcctctgccccctgagcagctgggactacaggcacacaccatcaccctcagctactagtggctttgctttaaagaaacagtggaatcctaaatttatgactaaaaattcccccaaaagatgaaagatctacaatgtttttgtcagtattatatttgactcaggaactaattattaagggagctttgacacctgcagatggagggctgatcttgtgtcaagttaacaggaagactgcccacagatgacactgcatttgtatccctgtggatgtagagtattgggaaggcatttgtttagtttcatgcctccaaaccatgcattgtctgtgatgtatctgcccagccttctcagaactcaatgttgtacatttttccctctaggacctgaattggtcttggaggcagcttttagaaatcctctgtgtagttcctgtccacatgcactatatatttgtttcttttttctcctctcatgaatctgctcgtttctctacttctgtctacgtagaagcactcagcaactagtttctgctcattaaatgtgttctatatactagg

SEQ ID NO: 780 - DNA, 4316 bp, Homo sapiens
gcatgagtgggattcctgtgttcactgccacatccctgtgccttgtccagtgcccagagcttgtcctgcctcagcggtgtgactgtggcagcatctgagtttcttgactaagtgaggggaggaggcccaccctggcaccggccaggctcttggatatgtgattttggctaaaagacaaggaataaggaagggaataaaggtcaggccagaatcggaatcctcctcttgtgtggtggaaatatgcagagaactccggaattcttctgaaccctaaaaacatttgtatgctttctagctgcagctcctcctggcactctgtgttataaatagtttcaagcaccgtgcttctctgagggctttctctcatgtgccctcgtccatccctttcgagttggcactgtccgatagaattctgtgatggtgatggccacttctgcatggtccggcaaggggcagggcgccacatgtggctactgagtattgcagtgtggctggtgagagcaacaagctggatttttaattaatttgttttaattcatttaaatagacatgtgggcaatgcaggtctggacagctgagaattatgaccctcaggaggtgtggtggacagtggtttacttccgaacaagcccagtgcctgcttttgaagacgatatggcactgaactgagagtggtgctcatctgtgtgacaagcaggatggaagcttgctataaatattgtgatataatgctaatgacctttacacagctaaaatcaatcctttcacttttccggttttatgtgatactgccatactagtcagtctaacactgacccctgttggttgtgcttcagcataacgaaattaggatgacgagaatctgaaattacatctaccatccaggtgactaagttatgcagaatatagtccaacttatttgcccatatttggttaatcagatatctgtgtttgcaggaagtttgctgtatggattaccaatttcaaaaatcaaactacactaaaattcagatgagtccgttgtgttccttttgaacactcctcgttgaagaggctgctgttcaggcttcctcgtggtgctgttgcatccaagaattgatgcccggagagctgatgaaaaccttggaatgcttcttgtagaattttttgaactctatgggagaaattttaattacttgaaaaccggtattagaatcaaagaaggaggtgcctatatcgccaaagaggagatcatgaaagccatgaccagcgggtacagaccgtcgatgctgtgcattgaggaccccctgctgccagggaatgacgttggccggagctcctatggcgccatgcaggtgaagcaggtcttcgattatgcctacatagtgctcagccatgctgtgtcaccgctggccaggtcctatccaaacagagacgccgaaagtactttaggaagaatcatcaaagtaactcaggaggtgattgactaccggaggtggatcaaagagaagtggggcagcaaagcccacccgtcgccaggcatggacagcaggatcaagatcaaagagcgaatagccacatgcaatggggagcagacgcagaaccgagagcccgagtctccctatggccagcgcttgactttgtcgctgtccagcccccagctcctgtcttcaggctcctcggcctcttctgtgtcttcactttctgggagtgacgttgattcagacacaccgccctgcacaacgcccagtgtttaccagttcagtctgcaagcgccagctcctctcatggccggcttacccaccgccttgccaatgcccagtggcaaacctcagcccaccacttccagaacactgatcatgacaaccaacaatcagaccaggtttactatacctccaccgaccctaggggttgctcctgttccttgcagacaagctggtgtagaaggaactgcgtctttgaaagccgtccaccacatgtcttccccggccattccctcagcgtcccccaacccgctctcgagccctcatctgtatcataagcagcacaacggcatgaaactgtccatgaagggctctcacggccacacccaaggcggcggctacagctctgtgggtagcggaggtgtgcggccccctgtgggcaacaggggacaccaccagtataaccgcaccggctggaggaggaaaaaacacacacacacacgggacagtctgcccgtgagcctcagcagataatggctcctggctgcgtcagcctcccccacccctctgcagactgccccgcggcctcggccaccggcaggggaaccgagaccagcaccccgcacgtcagccgggctcgcggcacgcccgccgctgatcactctgcatgtttcttcgtgtggtggtcgcgtccatcttcaagaacagctcgttgtgctcatctgtgaagccttattaaacgtggacgttgttttctgccttcccaggattcttccttcagtgctgaggcaggtcgggctcaggaactgcagggacgtgaacatgcgcttgcggtttgaggtagccgtgtctgttccttcgcggtttgctattttcatttcctgttcgtcaaagcagcagaggagatcaaaccccgttcgtgtgtctttcctccacggataagcttgggaggtcattgttttactgccctcacattttgtttgaaatttcagaactgtttttctatgtaaatattgaaaacttatgatttgtgcaataactcagatattttttatttaatttcctattttcacataagttatatttaagggaggagggaattttttttaaacaagcttaggtcctttcccgagctgcattttctaagttgggtcatcgtgtcggctggttgtctgacgagcatcgttacaaacaccatgatgaggggtttggggttttattttgatgtcttttcttttggtcggaagtgagtgaaggagccaggtcgccctgaaggttttccaaagggcttggctccagagccacctggcagactgcccgtggccctgctgtcgggccccaggccgttgtcctgctctgaccacagagttttaatgttttggttttcacttcttttaaactggacaacaaatccagcatttcaagtgccagaagtataactttctaaggagagaagggttgtcacattataaaatctttaggaaaatgtgaactggaaaacgcttcggtcagttttagtgacatagcctgtgatgatgggtctggtgactattattgcggaccgtggtacccagttttaggaatgtggagaaaggaattctgttgattccgttgaggaatctgtagcgtatgcattcgttctgttaagagcaaatctaggagaagtgcttcagctgcccagtgcgccgtggggagtgttttaacggatcgtgtcgcaggagagcacagcccagcgttggggccgggaccgctggcgcccgacgtcggaagcatacaggtatactatgcaagtgtattctgccacaacaaccactgtctttgttacctttttttgaacaagaatatatccatcctgcctaaccctgagtttttggagcaccacagttgtcctgggagttggttgcatcttgtaggccatctgacttcctgtttttaaaacgggggtctggtcttgctaaacactacaggtaggttggtctttgaagtccactagtggagaatgtcaagacaagatacttattaccatgacatctgatgcatgtgcagcagtggggagttctagattgatctctgaatgtgatcgacgcccagcaaggacaagctttaaaatgtctgcggtctgcccttttgaagcaggactggctcactctgtcattgggagctgtcagctgcgactgcaggttctctaggaggcattccagaatagagtagcacactgtgtctgcagttctcgatgaccgaaagttatcaaaaatatttaaaatatttaaattgtgaacctattgataaagaatatttataaaaactgatctgtaggcctgtactaatctctacgcattagcaatattgactgtaaacccacattaaggaaaccactacgggtctggcagtgcgtgtcccgtggggtgtgcattttaaaactcgattcatagacacaggtaccatgttccatttccgtcatggtgaagcaaatgaattggcctggctaccactgtggtcgcgtgctacaggtttgacaaaaagatatcatgtttcgatttttttgtgtgtggacaacaatatggaagctaaaattgacatatttttatgtaaagtttttctattctttgatttttaataaactttggaaaccag

SEQ ID NO: 781 - DNA, 5795 bp, Homo sapiens
cggccgggttcccgcggcgccgccacagccagtacgtgagtccgcggccgcccgcgctcccgcccccggcccttgcctgccacgccctcccctttttggccgggtcttggctgctccgcgggtctcgggcgggatgtgggagtaagcgtgccccctccccgcacatgtctcagtgggtgcgtttctggggagcggaggggagggaagacctcgggcaggcagaggggtgcagggcgcgcccctggaacagactgggctctgtgtgggccacaactgcgacgtttgaacggaccagcgtcatgttaggtctgctcaacgttccgagaagggccagggccccgctccggtgttcctcaactattcatccctgttttggatgggaggggatccctaaaaattagcgcttcaaaatacccaccatttcgtgctccctctgcagttaagtttggtactctaggacttgagagtgattgcgagggcagagagacctctaggggtgatctgattcgaccttcttcccctccgctccaccccaccacctttttttcttttttttttttggtcggtgagtgatgatgataagctcccgctgcaggtgtgaatagagaccccggaggtgcgtcctagccctcatctggggaagcgcacctgcatacagacgggtgcaccggggaggaggcgacctgccgcgtgttcctgcaagcagaaaaggagttaactaggtagggagaggaaggtcgaagagtttcttagacccaggggacagcctgcgggaacccaggggtgggacggaaaagatcactggggaatgccagggctgggtgtgctgctctaagacatttaaagtagttggccagcaggagcatttctttgtgaaagctcaaggcttaaaaaaaataataatatgaaatatgtaatatattcatatggctgggatattaaaaatataaaaagttaccagtgaaagatttcttcccatcccgcttaggtatcttcctaggccctaccctcttaggtaaccacttttgttcctttgtatcttttccgaatttctgcaaatactggcaaatataactagttagttcccccttttttcacacaggtgatagaaatccttctaactccttgattctttcactttatcttactggtctctacatgtcagaacacagaagttgtgttttgtttcgttttgttttacagagctgtgtgtcacatttgaagacgagcactgaggatgaggaaccaactgaagaatatgaaaatgttggaaatgcagcatctaagtggccaaaagtggaggatcctatgcctgaatctaaggttggtgacacatgtgtttgggatagcaaggtagagaatcaacagaaaaagcctgtggaaaacaggatgaaggaggacaaaagcagcatcagggaagcaatcagcaaagccaagagtacagcaaatataaagacagaacaggaaggtgaggcatctgagaagagcttgcatctgagcccacagcatatcacacaccagactatgcctataggacagagaggcagtgagcaaggcaaacgtgtggagaacattaatggaacctcctaccctagtctacagcagaaaaccaatgctgttaagaaattacataaatgtgatgaatgtgggaaatccttcaaatataattcccgccttgttcaacataaaattatgcacactggggaaaagcgctatgaatgtgatgactgtggagggactttccggagcagctcgagccttcgggtccacaaacggatccacactggggagaagccgtacaagtgtgaggaatgtgggaaagcctacatgtcctactccagccttataaaccacaaaagcacccattctggggagaagaactgtaaatgtgatgaatgtggaaaatccttcaattatagctctgttctggaccagcataaaaggatccacactggggagaagccctatgaatgtggtgagtgtgggaaggccttcaggaacagctctgggctcagagtccacaaaaggatccacacgggggagaagccctatgaatgcgacatctgtgggaaaaccttcagtaacagctctggccttagggtccataaaaggatccacacaggtgagaaaccttacgaatgtgatgagtgtgggaaggccttcattacttgtagaacacttctcaaccataaaagcatccactttggagataaaccctataaatgtgatgagtgtgagaaatcttttaattatagctctcttctcattcagcataaagtcatccacactggagagaaaccttatgaatgtgatgaatgtgggaaggctttcaggaacagctcaggcctcatagtgcataaaaggatccacacaggagagaaaccttacaagtgtgatgtctgtggcaaagcattcagctatagctcaggcctcgcagtccataaaagcattcaccctgggaagaaagcccatgaatgtaaggagtgtgggaaatcctttagttataactcactacttcttcaacacagaactattcataccggagagagaccttatgtatgtgatgtgtgtgggaaaacgttcagaaacaatgcaggcctcaaagtccacaggaggctccatactggggaaaaaccatataagtgtgatgtgtgtgggaaagcctatatctcacgctctagccttaaaaatcacaaaggaatccaccttggggagaagccctataaatgtagctattgtgagaaatccttcaactacagctctgcccttgaacagcataaaaggattcataccagggaaaaaccctttgggtgtgatgagtgtggtaaagctttcagaaataattctggccttaaagtacataaacgaatccacactggggaacgaccttacaaatgtgaagaatgtgggaaagcatacatctctctctcgagccttataaatcataaaagtgtacaccctggggagaagccctttaagtgtgacgagtgtgagaaggccttcatcacataccgaacccttacaaaccacaaaaaagttcatcttggggagaagccctacaaatgtgatgtgtgtgagaaatcttttaattacacatcgctcctttctcagcacagaagggtccacactagagagaaaccctatgaatgtgacaggtgtgagaaggtcttcagaaacaactcaagccttaaagttcataaaagaatccatactggggagaggccctatgaatgtgatgtgtgtggaaaagcctacatctcacactcaagccttattaaccataagagtacccaccctggcaggacaccccatacatgtgatgaatgtggaaaagcttttttctcaagcagaactcttataagccataaaagagtccatcttggggagaaacccttcaagtgtgttgagtgtgggaaatctttcagttacagctctctcctttctcagcacaagaggatccacacaggggagaaaccctatgtgtgtgataggtgtgggaaggccttcaggaacagctcaggcctcacagtgcataaaaggatccacacaggggaattttcctccgtgggattcagaaatgagaggatcaccaccaggacaacacctgaagatggtgttagctgaaggcagacattggggacctgaagtctgtctgcatcaagaccttgagtaattggccacagctgtacccaaggagttcctgggctggggagacccttcatttctcttctccagcttcagctaaaggcctagagacatggagaaggaagcagaatacagtacttcaattgtcttcctactgaggagccattctcatttagacctggcggttctcaggtctggatagtgtcattgtgcgaaggaagccgtttgcatgaaacctgtgtagagtcagtgaagtatagtggccgaggacatggtctccacaaggaagcctgagttcaaataaggactttcacttatttccagatgactttaggcaagtaactaaacttgtgtgtcctcacgtgtcttttttttttttttttttttttttttttttttttttaagacggtctcgttctgtcgcccaggctggagtgcaggggcattagctcactgcagtctccacctcctgagctcaagcaattctcatgcctcagcctccagagtagctgggattacaggcatgcgccaccatgccaggctaactttggtatttttggtagagaaagggtttcatcattgttggctgggctggtcttgaactcctgacctcaagtaatctgcccagcctcagactcccaaggtgctgagattacaggcctgaaccaccacaggctaccatactgggccctcacctgtcttttgtaaagataatagtagcaacctcaggttgtaatgagggttggaaacattaatagtgttaaggtccttagaaggctgcctagaatgagaagtatttgcataagaatgtatggaataagtctgaagtgtggtggccctgtccaaagactcagcatctagatgcttgggcagtggaggacaactcttacctggaagtcaaggaaatccctcaaggaccaccccctactcagacaaaacttgagaagaaacatgagaaaagttattttttggatgttcctgagtggtatcttgcttctaagtaagcaatccattgtctctaaacaaacatgttttgtctttgtcgggctgcaaaagggctcagcaggaggagcctccagctgaggccagtaaccacacgttgggggttgagggctgcctcacgcttgcctttctggcctgggcagcctgctcactcacatggtacacatcttgtttcccctgtgttttcccagcaatattcagatgtgctggagattactgtaggaagggttggtgagagccagacttttaccatcttaaccatggctatttctggtgagtgtcccttaagatctcagaggataagtagtggtcctggggtgggcagggcaaagccccagagaggagcaggtgaagttcctctggtcttgggtgcaaaccatggggccatattccattcagtgcaataatatggatttatttcctgttctgtcattttcccatctgtaaaatgagggaaaagacctgtttacaagattattttaaggcttaataaaaatgctctgtactttataaaaattttgtacaaacgttgttaaattgactatctttttaaaagttgaaggagataagaatgagagcaaaagttgatgaaacagcaaacacaacaaagaacaacaaagtcaaggttgctgctttgaaaagacaaaattggtaaacctctgatgtgattgagaaagaaaagcacaaataatcaaagtcaggaatgaaaattgggaaatcacaacagattccatggcttatttagaagtatattttttaacttccaaacatgggaatttcctagttatatttttgttattgttgttacaaaacatggtccatgtgactgctgtcctttgaattgtgttgagatttgctttatggcccagcatgtgtttaaccttagtgaagatttgtgggcacttgaaaagaatgcatgttctgcagatgccgcatgcagtcatctacataaagccattagattgtaatacgttgttcatatcttctctgctcttaatgaagttttatttgcttctattaatgagacaattgttgagttatctctacttagatatagttctgtgaactttgctttatatatttgaggccacacaaatataaaattgttatatgaattgaaattttatgaagtaaaccttttatcccta

SEQ ID NO: 782 - DNA, 2557 bp, Homo sapiens
gttctcgcgagagtactgcgggaggctcccgtttgctggctcttggaaccgcgaccactggagccttagcgggcgcagcagctggaacgggagtactgcgacgcagcccggagtcggccttgtaggggcgaaggtgcagggagatcgcggcgggcgcagtcttgagcgccggagcgcgtccctgcccttagcggggcttgccccagtcgcaggggcacatccagccgctgcggctgacagcagccgcgcgcgcgggagtctgcggggtcgcggcagccgcacctgcgcgggcgaccagcgcaaggtccccgcccggctgggcgggcagcaagggccggggagagggtgcgggtgcaggcgggggccccacagggccaccttcttgcccggcggctgccgctggaaaatgtctcaggagaggcccacgttctaccggcaggagctgaacaagacaatctgggaggtgcccgagcgttaccagaacctgtctccagtgggctctggcgcctatggctctgtgtgtgctgcttttgacacaaaaacggggttacgtgtggcagtgaagaagctctccagaccatttcagtccatcattcatgcgaaaagaacctacagagaactgcggttacttaaacatatgaaacatgaaaatgtgattggtctgttggacgtttttacacctgcaaggtctctggaggaattcaatgatgtgtatctggtgacccatctcatgggggcagatctgaacaacattgtgaaatgtcagaagcttacagatgaccatgttcagttccttatctaccaaattctccgaggtctaaagtatatacattcagctgacataattcacagggacctaaaacctagtaatctagctgtgaatgaagactgtgagctgaagattctggattttggactggctcggcacacagatgatgaaatgacaggctacgtggccactaggtggtacagggctcctgagatcatgctgaactggatgcattacaaccagacagttgatatttggtcagtgggatgcataatggccgagctgttgactggaagaacattgtttcctggtacagaccaaatttggtatatatatattacagtccaagatataagaaatactggggaggggacaagatggacaactagaaatagctgcaatcagaggcttccaacaagaagaacgaaaacggtgagtgaatcctgcaccggcaactgaggtattcaccttctctcaatgggactgactaggtggttggcatgacccatggagagtgaggaaaagcagggtggagcgacagcccacctgggagctgcaaagggcaaggggagctcccaccccaagccaagggaggtggtgagtgattgttctaccctgtccaggaaatcatgctttttccaaggatctgtgcaacctgtgattcaggagatccccctcatgagcacatgccaccagggccttgggtcccaagcacagagctgtgtaggttcttggtagccctttggctggagactacataagactactgagttccttgggggaggggttgctgtcatcactgcagctccagtctgctgttttcccctgctggtgctggagagactgggcggttgggacccagaaggaattccctacagtgcagaccctacagtggtggtggcacatcatggccagactgactctttaggctgaactctgactcatccccctacacggggcagggcctctctgcgggaatttcagcaactccagccaggggtttacagacagaattccaatctccctgggatggagcccctggtgggaggggtggccacagtctccacagatcagcagagttagtctttccccttgctggctctgaggaatccaggcagtctggatgagtgagatttcccccagtgcagcacaccccctccaccaaggggcagccagagtgcttcgttaggtgggcctgtgcctcttgactggatgagacccctccaacaggggtcgccagacaccttatgcaagagcattcccactggcatcaggttggtgcccctctgggacggagctcccagaggaaggaacaggcagccatctttgctgttctgcagtctccactggtgacacctccaggtacaggagggacccaggcaaagagtctggagtggacccccagcaaactgcagcagccctatggaagaggggcctgactgttaaaagcaaaacaaatggaaagcaacaacaacatcaacaaaaaggtccccaccaaaacccctccaaaggttagcagcctcaaagttcaaagctaggtaaagtcatgaagatgagaaagaatcaatgaaaaaacgctgaaaactcaaaaagccagagtgcttcttttcctccaaatgatcacagcacctctctggcaagggcatagatgtgggctgaggctgagatggatgaattgacagaagtagacttccgaaggtggataataatgaatttcactgagctaaaggagcatgttctaacccaatgcaaagaatctaagaaccatgataaaacattacaggagct

SEQ ID NO: 783 - DNA, 7570 bp, Homo sapiens
ctcaaaagcaaaattgtggggggtgtgagggtaaaggggagcaaatgacagtcagtactacctcctttgaagaattctcaatcctggttgtacattgtgatcatctaggaagagattttaaaatgcagatgctgatgcttagaccctaacctcagagattctgatttgttgttcttgcgtgggggtccccattggaaagaatttattatagctcccctgctgattctaaagttctaggttggagaatcactgaactagactactacttgctgagaggttacgtaaattaaaccagatgttttttctaaagtctctttcaaatttgagaagataaatggaaattaacacttacggattacataatacagctagacactttcacaatttattctaataattgaattagtatatgtaaatctcttagcacagtgaccgtctgatatggtgtagtaaactctcaataaacattagctatttttattatatcctctccataactgttcaaacaaggtattatattgttacactatagatgaggaaactgaggttctgatgttagttttccaaggcccacagtagtaaaagcaaagtttggatttgaaccaaagattagttccagtttccagagccctcttctctcctcgacaggccttccctaaagcatcaagaagtttatgcaaattagtggttcacctgagtgaacatttaaaaaatttaatagtaccacttcctcttgacctgtttgtaaggagttcctcttaaatgcaatttctgaaaaagagaagcataaactgagacatccacattttttccttatttggccaaatagaagtgagaacctctgaggatagaggaattggatggaggtgcccttcagaactcatggagaaaagcactgctcccagtaaaatatctctcattctaatgaatgggatctttcgaagatggtttggctgccttggagatttggagatctgatgccacgatgaggactcacacacggggggctcccagtgtgtttttcatatatttgctttgctttgtgtcagcctacatcaccgacgagaacccagaagttatgattcccttcaccaatgccaactacgacagccatcccatgctgtacttctccagggcagaagtggcggagctgcagctcagggctgccagctcgcacgagcacattgcagcccgcctcacggaggctgtgcacacgatgctgtccagccccttggaatacctccctccctgggatcccaaggactacagtgcccgctggaatgaaatttttggaaacaacttgggtgccttggcaatgttctgtgtgctgtatcctgagaacattgaagcccgagacatggccaaagactacatggagaggatggcagcgcagcctagttggttggtgaaagatgctccttgggatgaggtcccgcttgctcactccctggttggttttgccactgcttatgacttcttgtacaactacctgagcaagacacaacaggagaagtttcttgaagtgattgccaatgcctcagggtatatgtatgaaacttcatacaggagaggatggggatttcaatacctgcacaatcatcagcccaccaactgtatggctttgctcacgggaagcctagtcctgatgaatcaaggatatcttcaagaagcctacttatggaccaaacaagttctgaccatcatggagaaatctctggtcttgctcagggaggtgacggatggctccctctatgaaggagttgcgtatggcagctacaccactagatcactcttccaatacatgtttctcgtccagaggcacttcaacatcaaccactttggccatccgtggcttaaacaacactttgcatttatgtatagaaccatcctgccaggtatgatggcagcttgaaatcggttcctcctccagactttggcacccctacactgcattattttgaagactggggtgtcgtgacttatggaagtgcactacctgcagaaatcaatagatctttcctttccttcaagtctggaaaactggggggacgtgcaatatatgacattgtccacagaaacaaatacaaagattggatcaaaggatggagaaattttaatgcagggcatgaacatcctgatcaaaactcatttacttttgctcccaatggtgtgcctttcattactgaggctctgtacgggccaaagtacaccttcttcaacaatgttttgatgttttccccagctgtgtcaaagagctgcttttctccctgggtgggtcaggtcacagaagactgctcatcaaaatggtctaaatacaagcatgacctggcagctagttgtcaggggagggtggttgcagcagaggagaaaaatggggtggttttcatccgaggagaaggtgtgggagcttataacccccagctcaacctgaagaatgttcagaggaatctcatcctcctacatccacagctgcttctccttgtagaccaaatacacctgggagaggagagtcccttggagacagcagcgagcttcttccataatgtggatgttccttttgaggagactgtggtagatggtgtccatggggctttcatcaggcagagagatggtctctataaaatgtactggatggacgatactggctacagcgagaaagcaacctttgcctcagtgacatatcctcggggctatccctacaatgggacaaactatgtgaatgtcaccatgcacctccgaagtcccatcaccagggcagcttacctcttcatagggccatctatagatgttcagagcttcactgtccacggagactctcagcaactggatgtgttcatagccaccagcaaacatgcctacgccacatacctgtggacaggtgaggccacaggacagtctgcctttgcacaggtcattgctgatcgtcacaaaattctgtttgaccggaattcagccatcaagagcagcattgtccctgaggtgaaggactatgctgctattgtggaacagaacttgcagcattttaaaccagtgtttcagctgctggagaagcagatactgtcccgagtccggaacacagctagctttaggaagactgctgaacgcctgctgagattttcagataagagacagactgaggaggccattgacaggatttttgccatatcacagcaacagcagcagcaaagcaagtcaaagaaaaaccgaagggcaggcaaacgctataaatttgtggatgctgtccctgatatttttgcacagattgaagtcaatgagaaaaagattagacagaaagctcagattttggcacagaaagaactacccatagatgaagatgaagaaatgaaagaccttttagattttgcagatgtaacatacgagaaacataaaaatgggggcttgattaaaggccggtttggacaggcacggatggtgacaactacacacagcagggccccatcactgtctgcttcctataccaggttgttcctgattctgaacattgctattttctttgtcatgttggcaatgcaactgacttatttccagagggcccagagcctacatggccaaagatgtctttatgcagttcttctcatagatagctgtattttattatggttgtactcttcttgttcccaatcacagtgttagcactgaagctataaattacctggtcattttgtgatcacaagagtctatgcaaaaaaaaaaatttctttaccccagattatcagatttttttccctcagattcattttaacaaattaagggaagatattttgacacaagaaagcaggaacgtggagaaattggagcaggaaaagaaattatcaaagcaatagaaatagcttggtggtcctatggtgtttttggaagtatttggcattgctaattgagcagtccatatagtactacttttagaagaaacaaaaagtctattttttaaagtaatgttttttcttatgagaaaaaggtttagatagaattgggttttattaatattaatttaatgctattagcaatttccatatactatattgtggaaaagactgaagaatacaattctgagaaatataaaaaaattttaatggtatactcatgttgaaagataaatgttgctaagtcctggtatgatggtgtgagcttccttggggaagtacttcttgagttatgtaactaacaggatgttttactacagatctggatggctattcagataacatggcaaaaaatgatagcagaagatcattaaaaacttaaaatatattttattagaaaacatttatctatgaatgaatatttccttgatgctggtctctgcacacatatgcttggttacttgcatgcattcattggttgttcaataagtgagatgattacagataatactgtattttccttatatggaaaaccgttatagacccaataacaactaaacctttcaaaagaaaatattttctattatgaatgttgattttcataccaaagaagatggagagtctaaaatttggatatgattcttatgtttttttaatagaaaaccttcttcaagtttattttcctaaataaacatcataattgtgaattttctctagtattcttcttctttgttccattatattcaaaatgcattaacattttccaaaatttttgaagagagatctttatttggacgtgtattcattaaatatataaagtagtgtttgaatcaaaagaagtattttctctgcttattaaccttaattgttgtttaagcatattttaaatatttaaaacaatagccaattctgatatttaagtagcacccaacttttaaaagcataaaattttcaatcaactcctcagaaggtaacagcagcatagaatactagaaaaataatccatagtttctacttgagcataagaaaatgatatacttaaaaggaacttaataaattatcatacattcagcatatttgagtcatatatttctcctttgaaacaaaatatgttcagctcaaattttacagtaaggacacactcactgatttataggtgtaaagtaacaacagtaacctttcctcttacttgctcttttagttcacagcaataccagtatgtaaccaaaagacaagctagagaaacttttaagtacctttctgcagttctaatttgaaccttcttgcataaagaaaacacaagtttgacttttaactgtgcttcacttattatgcttggaatctagaaaacgacttctgaggaagtaatttttttcccctctcatggaaagtctctagggaggatgtcattacacactgtttaaaagaataatgttttcaaaagaataatgcttccgtttgtcctgcatggatgctcttactaggatttaaacttgctttatgtgacagattctccatttacttaacctcactcaacattcctctcttttactctttctcactcaaaaggatgaactgtctgaaatgatcaaaaggaaattttgaaagaaaaaaaaaaggaaaattattctttgaggttaccaagcaaacctgatctcagatccaaactgagacatactttctaacagagatgaaaagtgcaagtgagtgccaaactcgcttttcttttgttttcattaggttaaggcttgacaatacgttagtcgccacagcatgatccagtgtaacatattagttcattttaaagtagtctttttaaaatacgcatctttaaaacaaaatgaattaaaattatgtgttttttttttttcttctaatgaacctggtatttatttccttaaaaagaaacttcctcaggcagtgacttaagtggttaagtgaaaaaaaaaaatgctgaaacaaatcacccctcttcataatgaaacatgttttttttaatcagggatagtgcatatttgagtaaaactagggaactttttgtaacttgaaaacaaagcaatgttaaatctcccttgaaactgagtaatcagttatggaatctgtttcaatgctgctcactatgacaggaatgtttcaagttcatttgataatatgtgagctgttgttcaggggattggcaggactcttggtcctagccttaaagaaaatttgagaatcactagcatacagagcttgtcagtgcagtaaaagtggtatattcctgggaagctgaggtgggagtattgcctgagcttaggagttctgtgctgcagtgagctatgactgtgccactgcactccagccttggagacagagtgagaccgtgtttctctcttttttttttttttaagtatattcccttgtttataactgattagcttatttcagttgatggtagatgagacctatggtggtggatgagacccagaattttcagagagaacattcttttgacaacattgttttaatcgtcaaagtcaggtggaagaccgtgttctggaactattttaattgttaaaatgtatcacctaagataatgaattcttccacaaatattttagtcatagtttttaagtaccacgtattctaaggttatcagaaaatatgtcttaacagaatgttttgcatactgaataatttgtttttgaaaaggaaaatttacatttgacttactcagtttttaaaaaattatttttatttctagagacacggtcctttctgcatcacccaggctgaagtgtagtggcgtgatcgtagctcactgcagccgcaaacttcccatcttaagcgattcttctgcctcagccttccaaagtactgggattagaggcataggtcatcatgcccggccaagttaaaaaaatttttgatagttcacaaaccactcacaaaagaatctgaaatttctccaagtgttaagagaaagcaagctatgaaatgctatatttgtaggcttaaaagtaaattagtgtgttttcttaaaaatctaaaccaagattaaaatgaatatagtcataggtatgaggggcatgtaatttatcttccgactggagatacctttgagagttaaaggaggagcaattaattgttattccaggacaacagatataaatcgagattatactaggtgaactgggacatatggtcatctttgtcatagcttaattcaggaaaaaaggagttagggaagtctgaaggtctaactcaaagtttgatgctttttaagcaagtttagggaacttgagatgacctgattgagacccctaaatctacagatgaggaaagcaagcctcaagcaaggggggcctgatcctttccctgttcgctgtgtattccctgtctgtggcaaagcccattgccttgattctcttctctttactttcatgttgagaagtagtttctttctgcagtttatttaatttactggcaaaatgacgtatttttttttcagcaatgtttcagctagatatttgctttatgcatgtaatgtcaatgaagtactcataagttttcaagaaatgactgatataaatcatgtgttccactacatagtctaaatatttagtatttggtcatctattttaatatgttcaaattctgttaaacaagacatagtcactatgtgaagaataaaaatagacaaagttgca

SEQ ID NO: 784 - DNA, 6616 bp, Homo sapiens
gcctcccaaagtgctgggattacaggcctgagccactgtgcccagctgggacatgagaatatttttatgttccacccagcttttcccattattccctctcagttggttaactagtatattatatgcctccattgttaatttctcataggactaagcttctgtaacttgctgtttgaccttaattttaagcatatgcttcgtcaggatactgcccagaacattgctactgaaagtcagttcatagactcattctggtcctataactaaagaatgtctgcttatttgggagtaagcagaaacttttattgtaattggagtaattttgtctgaagctaaaaataaaaatttaggacttgttttatattttagttttatttttcttataattcatttttatcctatttacacagtgtagacctcttttagaaataaaaattggcctttcaccacagatagcttgggaagtactcatctagaatctcatcattgagctcttcctctgtaccggtgctactcaaaatgcggtcctggcctgacactttgtcagctgtttgtctgcacaagataatgaggttacactaggatgtaaatcagttttacgctcactgcttacttaaatggacagttttaagtttcagttttaagctcactgcttagttaagtggacattttgattggttggttctgatagtaggcctttttcaaagtaatgtgttgctttctgttctggtataagctccttatttctttgcaaacctgtagtttaaagagcactgctctagaccatcttggaattcccatgtctaccattgttctcttctgtttttgattggtggatttacattttggaatgagatgagaacacagacattgctgaaaacctctatcagaaagttagaattctttgctgggttatgaccggccctcaaaacctagagaaaaaggccaaacacgtcaaagctacttgggcccagcgttgtaacaaagtgttgtttatgagttcagaagaaaataaagacttccctgctgtgggactgaaaaccaaagaaggcagagatcaactatactggaaaacaattaaagcttttcagtatgttcatgaacattatttagaagatgctgattggtttttgaaagcagatgatgacacgtatgtcatactagacaatttgaggtggcttctttcaaaatacgaccctgaagaacccatttactttgggagaagatttaagccttatgtaaagcagggctacatgagtggaggagcaggatatgtactaagcaaagaagccttgaaaagatttgttgatgcatttaaaacagacaagtgtacacatagttcctccattgaagacttagcactggggagatgcatggaaattatgaatgtagaagcaggagattccagagataccattggaaaagaaacttttcatccctttgtgccagaacaccatttaattaaaggttatctacctagaacgttttggtactggaattacaactattatcctcctgtagagggtcctggttgctgctctgatcttgcagtttcttttcactatgttgattctacaaccatgtatgagttagaatacctcgtttatcatcttcgtccatatggttatttatacagatatcaacctaccttacctgaacgtatactaaaggaaattagtcaagcaaacaaaaatgaagatacaaaagtgaagttaggaaatccttgaaagaaaatcatgaatgaacaaaggtaatatgtctagcactgcactgaaaaaggacttctgcatttctgacatagaacactggaatcccagtgaggaattctaagtgaacattccttatagaaacctttcacatgaatgactataaactgaagctttaaatgagctgtgaagtgtgttaaaatgtgttttgatacagtaatatataaatatgtctatatatatgaggaacttgtgttttttaaatggtggccaggtagaggaactagaaaagagattttgttgcctgttttctgaccatctgtgttattgtcactgagaaactaaaatagtaaatttactaaaactacactgcaccatgttagtaataaacagatctgccttaaagaaaagaaaattttagaaagaaatattgttgctcagtgttgttaatatagctcaagaattgagtttatatttgcagtatgctataaatgatacccccctaccacacccacacacacagtttttgtctaatgaaaatgttgctgtgattatttataattggtagtatttcttccagaagaagctaaaataagactggcacttaccctgaagtgcattaataaaaccacactttaaaattatcatgggccttgactatattatatacttgattctaattagtcatcttttacgcaatctctgttgtctcttttctaaatgtgtttagccactcttgaataccattctccactattaacattaatttactcaaaccgttcatagcattctgtaaacatgtattttacatatttgttcccaaatttgcccattgttcattatgggtaactaataataaatttaatgctgtttcaggatgcttttcttataacagtgccactctcaggaattactaagtgacattttaaattgatattttaaactctttccaactacatagttatggtttatttcattctcatcctgttgggatgagaacttgtttgtgcctttcataacttgtttaaagcagagttttaaaattagtttataggatctgaggtggctattagttacagtggcaagattatttagaaagcaagattttgatgagaattaaaaacaatagaaaatgtagagtgcttaaacaaaaatgttatattttgaaagagtagatacttaatttataaataacagtctgaaggttggtgctattttgggataattgttttgctaatggataattctaacaatgcagaatacctagtcaagactgtcatcaaaaacattcacaaatgtttcattctatttttagtgactctgtttaaagagtttctgaaaggaaagaaattttttatttttattatctttagcagtactgagtgtcatagcagaatattttacagactttctatgagattatttttatggtacaaagtatttacatttccctcatgtttatcattatgccaattttacatggcagtcatgccactgactctgctatttagctaagtaatttcttttttcggagactgtctcactctgtctcccaggctggactgcagtggtgcgattctcctgcctcagcctcccgagtagcggggattacaggcacgcgctgccacgccccgccagttttcatatttttagtagagacagggttttgccgtgttggccaggctggtcttgaactcctgacctcaggtgatccacccaccttggcatcccaaagtgctgggattacgagcgtgagtcacagcacccggctaagtaatttctatttattgtgccaaaacatgtcaaaatcatgacctctttgaatggtatatttgagaggatgttcatttcattggttaaccatggactactctgtccacgtagtgaaaacatgcaccagtttttacctattatcatggtagtatcatctgccaaaatttcaaggcattcattttattctttgaacaactcttcaccatggtgtggacatgaattttcatatgtgttacttgactagaagtataaatggtttactatagatatccaaaaaccttgagatttgctcataggaaatgaatattgtgatgaatcctgggctctagagtcagacttgcttgggtttaaattcttgctctaacacttactgtttttgtaaccttgagcaattttaatctctctgtgtctcaatttcctcatcttttaattagggatgataatactacctacctcacaggatttttatgaggattaaataaatgtaaggtttttagaacattgatagggagcaataaatagaagattgtattattattctgttaccttggagtgtaagtactgcatttaagtgaatgaaaaatttgctttgaccagatactgaaggaaataagtaatagctagtatttatccaatgccaactgtatgctaggtactgtgcttagataatctgtgtataatagtgttaatcctcaaaatttgggtgttatacccctattatagataaggaaactgaggctcagagacaaagtaactttgtcactgtcacaaagctagtaagtaacagaggtaggatttatattcaaaaccctgtgtgttcattggaaccgtatcaggcttggggctattcatgtagcattatttccatttttatgtatatgatatatgacgtctgatgcattggccagtaatagtcaaattaacccagccaaattgtcacagtgattcttaaactgtggttctcacacttgcccaggatgttgttaaatgcagatctgaagaccccaatctcagaaattcaaatttaagcatggggcccaagagtatgcattcttaccagataccttgggcagtgactgtcaaaagtctggtcccaacaaacagcattaacgtcacctgggaacttgttggaaatgcagcctctctcggggcctcatctcagatcagatctactaaatcagatactctaggggcaggggcaggggcaggggctagcagttgtgtttaagcaaactctgcaggtgtctttcttatcctagtttgagaaccaatacccaacaacctacgtgattttggtgcaagtagtgtttgaaacacactgaagattactgcccaattactaagacatttttcaaaaagcatgttttaaatcagtgtagtccaggatcacactatattaaatataaagataacttaaaggatcattggatcattcattttggccaaatttttagcttctccaaagtgactaacatcagggcctacaataaaatctgtaattctccaagtttagtaattttatattgaggcaggaagggctcattaagtactaataagtacataatttattaaaaacatacataagtgtcatcaaaaaggtccacaattgttagtaaaaaaaattaaattgaagtagtaaatgctgttttataacatacatttttctgctaattcattctgttttgtgtgacctaataaagcaaaagaaaaataaaaaagcaattctccaagtacttcatagagcacataaaaccagatttcatgatgatgatgtattcactatcttttagattaagatctttgttatttggtaaatgatttcagtatggttttaaaacataaggcttttgatgtcttatgttctctaataatggtatgcttgtattttctagtgggaagttcatagataaagcagatttttgtcccagtttgctttcaaatataaatttcagagggctttttcttactgtaatgaggtatgaaaataaatcattgatcagctcttaatattttttgaatacagaattggatttgagcagtaaatttgctaactggttattttcacaattttcttgaatattaatttttcacttctttgagactgtcaaactatagttactaccaggttgatgcactgtacttgaaagaatcccttgattaaattacatctagcattttatttgccatttcaattttcagttcattagactataattctttgacagtttctgcctggtgtttattgcccttctttgtttgctttattactaacttccattttctagttactcttaaatgctgccttcacaaggttaatttggctgttaatagtgattagaatttttatcacttaattgataattttaagcctactaactagggttccctatgaaattgaaagtaaaagtctaagaataatgcctgctggctctcgagatacttgccctacttaaaaatctataatttaaaattaattctatgtctacaattattaaaggaagtaaagttatttgggttcttccactcacccttttctcaaaaacaacaacaaaaaacaaaactcattttatttttctactttatagtaggcctgacagaaacatagtgaagcaatctgggaggcaacctgtggtagattttatgctaaatgttaatgtaacctctgttgattttttaaaaatgtgtttatatataagatttgaaataaaaactttaatacaggctagaataaggaattttacaaattctctttagagcaaccaacattaaagttttagagttgaattttgctctatttcaactcccttacctctctagttttcagtttatattaagttttaataactttgcggggccctgcaaattaataatctacatgaagtatattattagagggaaactaatcttactgctaagcagtgtgttgtactacatagtgaatgttcgtgttttggaatttaaaaattatttaaggtaatggtgttacgaatggtttaaaaatgtctggtgacttgcttatttttaagtgatcaccattaagtcagaaaaatgtatttttaaatgtttcttgaagtgccttttgaacatttttaaacagcggatttaaataatgcataaaataaattgccatgttcaaa

SEQ ID NO: 785 - DNA, 3232 bp, Homo sapiens
agcttgggcccgcggcggcggcaagggcgggagggagcggtcgccgcgggatttggagctgcctagcctcgcggtcgctttggcagcatgtaagcagctgtttgccaagaacccaggtcactgctaagaaagggtgccttcgggagaagagtgtccagaggataccaatgccagatgcatctggagttacactcagcactcgcagtatgagacattgtgtgccagcatctctttccttctggcaaagactgtagctctccaggtaggaggatcctggaagctgtgagcaccaggagccttgccagaggaggatggggccagatatgaactctctaccatgaacatggttctcggcttatgaaggaattttaagtaaaacagttatttaatttccacatattcaagtcaaaagccttctgtgtgaagtgccagtgattacccctccacaggagttatcaggatttttctggcaccaagtttaattcttcttcgtacttctggtagtgacagatctgcaggacagatttatctgttgaatgctcttgggcaggaaaaccatgtaaaacctctggaagcagcatcaggacagcagagcagagcccccgtcctcactgctcacttgcacagaaactccatctggactcggatgcttttactgaagacccatctagcttcaatcatctttagagtccatccattctggagagacctggcgtttgcagttgcctcctgtggccgtgtttttctgtcattctgttcccaggccttctattcaggcggttgaagggtgtggactttggaatggggtttgctgttcttcgggaacttgcttcctttccctggctggtgctgtcaggaaggaccatctgaaggctgcaatttgttcttagggaggcaggtgctggcctggcctggatcttccaccatgttcctgttgctgccttttgatagcctgattgtcaaccttctgggcatctccctgactgtcctcttcaccctccttctcgttttcatcatagtgccagccatttttggagtctcctttggtatccgcaaactctacatgaaaagtctgttaaaaatctttgcgtgggctaccttgagaatggagcgaggagccaaggagaagaaccaccagctttacaagccctacaccaacggaatcattgcaaaggatcccacttcactagaagaagagatcaaagagattcgtcgaagtggtagtagtaaggctctggacaacactccagagttcgagctctctgacattttctacttttgccggaaaggaatggagaccattatggatgatgaggtgacaaagagattctcagcagaagaactggagtcctggaacctgctgagcagaaccaattataacttccagtacatcagccttcggctcacggtcctgtgggggttaggagtgctgattcggtactgctttctgctgccgctcaggtgaactctggtccaggtcccaggatagcactggctttcacagggattagccttctggtggtgggcacaactgtggtgggatacttgccaaatgggaggtttaaggagttcatgagtaaacatgttcacttaatgtgttaccggatctgcgtgcgagcgctgacagccatcatcacctaccatgacagggaaaacagaccaagaaatggtggcatctgtgtggccaatcatacctcaccgatcgatgtgatcatcttggccagcgatggctattatgccatggtgggtcaagtgcacgggggactcatgggtgtgattcagagagccatggtgaaggcctgcccacacgtctggtttgagcgctcggaagtgaaggatcgccacctggtggctaagagactgactgaacatgtgcaagataaaagcaagctgcctatcctcatcttcccagaaggaacctgcatcaataatacatcggtgatgatgttcaaaaagggaagttttgaaattggagccacagtttaccctgttgctatcaagtatgaccctcaatttggcgatgccttctggaacagcagcaaatacgggatggtgacgtacctgctgcgaatgatgaccagctgggccattgtctgcagcgtgtggtacctgcctcccatgactagagaggcagatgaagatgctgtccagtttgcgaatagggtgaaatctgccattgccaggcagggaggacttgtggacctgctgtgggatgggggcctgaagagggagaaggtgaaggacacgttcaaggaggagcagcagaagctgtacagcaagatgatcgtggggaaccacaaggacaggagccgctcctgagcctgcctccagctggctggggccaccgtgcggggtgccaacgggctcagagctggagttgccgccgccgcccccactgctgtgtcctttccagactccagggctccccgggctgctctggatcccaggactccggctttcgccgagccgcagcgggatccctgtgcacccggcgcagcctacccttggtggtctaaacggatgctgctgggtgttgcgacccaggacgagatgccttgtttcttttacaataagtcgttggaggaatgccattaaagtgaactccccacctttgcacgctgtgcgggctgagtggttggggagatgtggccatggtcttgtgctagagatggcggtacaagagtctgttatgcaagcccgtgtgccagggatgtgctgggggcggccacccgctctccaggaaaggcacagctgaggcactgtggctggcttcggcctcaacatcgcccccagccttggagctctgcagacatgataggaaggaaactgtcatctgcaggggctttcagcaaaatgaagggttagatttttatgctgctgctgatggggttactaaagggaggggaagaggccaggtgggccgctgactgggccatggggagaacgtgtgttcgtactccaggctaaccctgaactccccatgtgatgcgcgctttgttgaatgtgtgtctcggtttccccatctgtaatatgagtcggggggaatggtggtgattcctacctcacagggctgttgtggggattaaagtgctgcgggtgagtgaaggacacatcacgttcagtgtttcaagtacaggcccacaaaacggggcacggcaggcctgagctcagagctgctgcactgggctttggatttgttcttgtgagtaaataaaactggctggtgaatgaa

SEQ ID NO: 786 - DNA, 1616 bp, Homo sapiens
acaataccaggcgggagggcgggtaggcggtttgtatccgggctgtgaggtgctcggagcctcggcggaccttgctgcctctgtctctttaacgcgagaggaagcgatgcagaggggtggaaaatggcagagctgcagatgttactagaggaggagatcccgtctggcaagagggcgctgatcgagagttaccagaacctgactcgggtggcagactactgtgaaaacaactacatacaggctacagacaagagaaaagctttagaggagaccaaagcctatacaacccaatctctagctagtgttgcttatcaaataaatgcattggccaacaatgtactccagttgctggatatccaagcctctcagcttcggagaatggagtcttccatcaatcatatctcacagactgtggatattcataaggagaaagtggcacgaagagagattggtattttgacaacaaataagaatacatcaagaactcacaaaataatagcacctgcgaatatggagcgccctgtaaggtatattcggaaacctatcgattacacagttctggatgatgtgggccatggtgtcaagtggctaaaagccaagcatggaaataaccagcctgcaagaactggcacactgtcgagaacaaatcctcctactcagaaaccgccaagtcctcccatgtcaggccggggaacactgggacggaatactccttataaaaccctggaacctgttaaacccccaacagttcctaatgactatatgaccagtcctgctaggcttggaagtcagcatagtccaggcaggacagcatctttaaatcagagaccaaggacacacagtggaagtagtggaggaagtggaagtcgagaaaacagtggtagcagtagtattggcattcccattgctgtgcctacaccttcgccacccactattggaccagggatgaggaacccatggatatggagggctgactgtatttgcctcgcatactagtcaagaatgacatttattatttcaagagcaaaccagtattgtacgatactccagctggagaatcagtgtctataaaggtgaattatgtttctaagagttttaatgttgctttacaggccagtatctactctggtgtttgcttattttgtgactttactacatttatctatgatattcaatatatatttcagtaaaatgcaataaatgtaaaataaaattaagataggaaagttacttttagaaagcatgaaaatttaagaaatccttggagagcattgaattagccccttgatttttagtaaatgaaatggagactttttatattgttaaaaatgtatatttttaaagtatgataatgaaaaatgttaggaaagaaattcttagcttttcaagcatatttttgaaaaaggagaaaaagccacttataaacataggcatatttgatagttaaggcaggtataaactcggtagcctctttatgtacaaaattcatactcatttgagcatgctttacatgggggtatcttttttctttttcttcccgatacattgtactttcttgctgtttcaaaatgttgagttttcttttcttgtactctgacctgaattataaactattt

SEQ ID NO: 787 - DNA, 6897 bp, Homo sapiens
gaacatggcgacacggagcagcaggagggagtcgcgactcccgttcctattcaccctggtcgcactgctgccgcccggagctctctgcgaagtctggacgcagaggctgcacggcggcagcgcgcccttgccccaggaccggggcttcctcgtggtgcagggcgacccgcgcgagctgcggctgtgggcgcgcggggatgccaggggggcgagccgcgcggacgagaagccgctccggaggaaacggagcgctgccctgcagcccgagcccatcaaggtgtacggacaggttagtctgaatgattcccacaatcagatggtggtgcactgggctggagagaaaagcaacgtgatcgtggccttggcccgagatagcctggcattggcgaggcccaagagcagtgatgtgtacgtgtcttacgactatggaaaatcattcaagaaaatttcagacaagttaaactttggcttgggaaataggagtgaagctgttatcgcccagttctaccacagccctgcggacaacaagcggtacatctttgcagacgcttatgcccagtacctctggatcacgtttgacttctgcaacactcttcaaggcttttccatcccatttcgggcagctgatctcctcctacacagtaaggcctccaaccttctcttgggctttgacaggtcccaccccaacaagcagctgtggaagtcagatgactttggccagacctggatcatgattcaggaacatgtcaagtccttttcttggggaattgatccctatgacaaaccaaataccatctacattgaacgacatgaaccctctggctactccactgtcttccgaagtacagatttcttccagtcccgggaaaaccaggaagtgatccttgaggaagtgagagattttcagcttcgggacaagtacatgtttgctacaaaggtggtgcatctcttgggcagtgaacagcagtcttctgtccagctctgggtctcctttggccggaagcccatgagagcagcccagtttgtcacaagacatcctattaatgaatattacatcgcagatgcctccgaggaccaggtgtttgtgtgtgtcagccacagtaacaaccgcaccaatttatacatctcagaggcagaggggctgaagttctccctgtccttggagaacgtgctctattacagcccaggaggggccggcagtgacaccttggtgaggtattttgcaaatgaaccatttgctgacttccaccgagtggaaggattgcaaggagtctacattgctactctgattaatggttctatgaatgaggagaacatgagatcggtcatcacctttgacaaagggggaacctgggagtttcttcaggctccagccttcacgggatatggagagaaaatcaattgtgagctttcccagggctgttcccttcatctggctcagcgcctcagtcagctcctcaacctccagctccggagaatgcccatcctgtccaaggagtcggctccaggcctcatcatcgccactggctcagtgggaaagaacttggctagcaagacaaacgtgtacatctctagcagtgctggagccaggtggcgagaggcacttcctggacctcactactacacatggggagaccacggcggaatcatcacggccattgcccagggcatggaaaccaacgagctaaaatacagtaccaatgaaggggagacctggaaaacattcatcttctctgagaagccagtgtttgtgtatggcctcctcacagaacctggggagaagagcactgtcttcaccatctttggctcgaacaaagagaatgtccacagctggctgatcctccaggtcaatgccacggatgccttgggagttccctgcacagagaatgactacaagctgtggtcaccatctgatgagcgggggaatgagtgtttgctgggacacaagactgttttcaaacggcggaccccccatgccacatgcttcaatggagaggactttgacaggccggtggtcgtgtccaactgctcctgcacccgggaggactatgagtgtgacttcggtttcaagatgagtgaagatttgtcattagaggtttgtgttccagatccggaattttctggaaagtcatactcccctcctgtgccttgccctgtgggttctacttacaggagaacgagaggctaccggaagatttctggggacacttgtagcggaggagatgttgaagcgcgactggaaggagagctggtcccctgtcccctggcagaagagaacgagttcattctgtatgctgtgaggaaatccatctaccgctatgacctggcctcgggagccaccgagcagttgcctctcaccgggctacgggcagcagtggccctggactttgactatgagcacaactgtttgtattggtccgacctggccttggacgtcatccagcgcctctgtttgaatggaagcacagggcaagaggtgatcatcaattctggcctggagacagtagaagctttggcttttgaacccctcagccagctgctttactgggtagatgcaggcttcaaaaagattgaggtagctaatccagatggcgacttccgactcacaatcgtcaattcctctgtgcttgatcgtcccagggctctggtcctcgtgccccaagagggggtgatgttctggacagactggggagacctgaagcctgggatttatcggagcaatatggatggttctgctgcctatcacctggtgtctgaggatgtgaagtggcccaatggcatctctgtggacgaccagtggatttactggacggatgcctacctggagtgcatagagcggatcacgttcagtggccagcagcgctctgtcattctggacaacctcccgcacccctatgccattgctgtctttaagaatgaaatctactgggatgactggtcacagctcagcatattccgagcttccaaatacagtgggtcccagatggagattctggcaaaccagctcacggggctcatggacatgaagattttctacaaggggaagaacactggaagcaatgcctgtgtgcccaggccatgcagcctgctgtgcctgcccaaggccaacaacagtagaagctgcaggtgtccagaggatgtgtccagcagtgtgcttccatcaggggacctgatgtgtgactgccctcagggctatcagctcaagaacaatacctgtgtcaaacaagagaacacctgtcttcgcaaccagtatcgctgcagcaacgggaactgtatcaacagcatttggtggtgtgactttgacaacgactgtggagacatgagcgatgagagaaactgccctaccaccatctgtgacctggacacccagtttcgttgccaggagtctgggacttgtatcccactgtcctataaatgtgaccttgaggatgactgtggagacaacagtgatgaaagtcattgtgaaatgcaccagtgccggagtgacgagtacaactgcagttccggcatgtgcatccgctcctcctgggtatgtgacggggacaacgactgcagggactggtctgatgaagccaactgtaccgccatctatcacacctgtgaggcctccaacttccagtgccgaaacgggcactgcatcccccagcggtgggcgtgtgacggggatacggactgccaggatggttccgatgaggatccagtcaactgtgagaagaagtgcaatggattccgctgcccaaacggcacttgcatcccatccagcaaacattgtgatggtctgcgtgattgctctgatggctccgatgaacagcactgcgagcccctctgtacgcacttcatggactttgtgtgtaagaaccgccagcagtgcctgttccactccatggtctgtgacggaatcatccagtgccgcgacgggtccgatgaggatgcggcgtttgcaggatgctcccaagatcctgagttccacaaggtatgtgatgagttcggtttccagtgtcagaatggagtgtgcatcagtttgatttggaagtgcgacgggatggatgattgcggcgattattctgatgaagccaactgcgaaaaccccacagaagccccaaactgctcccgctacttccagtttcggtgtgagaatggccactgcatccccaacagatggaaatgtgacagggagaacgactgtggggactggtctgatgagaaggattgtggagattcacatattcttcccttctcgactcctgggccctccacgtgtctgcccaattactaccgctgcagcagtgggacctgcgtgatggacacctgggtgtgcgacgggtaccgagattgtgcagatggctctgacgaggaagcctgccccttgcttgcaaacgtcactgctgcctccactcccacccaacttgggcgatgtgaccgatttgagttcgaatgccaccaaccgaagacgtgtattcccaactggaagcgctgtgacggccaccaagattgccaggatggccgggacgaggccaattgccccacacacagcaccttgacttgcatgagcagggagttccagtgcgaggacggggaggcctgcattgtgctctcggagcgctgcgacggcttcctggactgctcggacgagagcgatgaaaaggcctgcagtgatgagttgactgtgtacaaagtacagaatcttcagtggacagctgacttctctggggatgtgactttgacctggatgaggcccaaaaaaatgccctctgcttcttgtgtatataatgtctactacagggtggttggagagagcatatggaagactctggagacccacagcaataagacaaacactgtattaaaagtcttgaaaccagataccacgtatcaggttaaagtacaggttcagtgtctcagcaaggcacacaacaccaatgactttgtgaccctgaggaccccagagggattgccagatgcccctcgaaatctccagctgtcactccccagggaagcagaaggtgtgattgtaggccactgggctcctcccatccacacccatggcctcatccgtgagtacattgtagaatacagcaggagtggttccaagatgtgggcctcccagagggctgctagtaactttacagaaatcaagaacttattggtcaacactctatacaccgtcagagtggctgcggtgactagtcgtggaataggaaactggagcgattctaaatccattaccaccataaaaggaaaagtctgtttcaaaacactgaccacacataccaagaagggatgttggaagagcaaccaaatacatgtaccttgaattccgaaggcacaagtcacaactgcatttgaaaatctcagtggatggttggttctctttaacttcttttctgtgattttgatgaatctcagctgcttgcatatatttgggctaggatttgtacagaaggcagctgtgtgccacatccaaaaagtgtttgttgtaaaatatctgtgacatagtatcataataacgttttaagataaaggacaaagacagcagaggcatcagccagacgcgccaggttaattggtgaatgtagtggattagtaatgacaatgagaaaagccaccattccctgagcacttcttatacactaagcaccatgctattgttgctcgtgaatggatcccttattaatccttatgaatcctatgagataagtatccttatcctcattgtgtagctgaggaaatgggtttggagtggattgtgacttgtccctggttgccatgattataattcaagtcagctttaccatatgcagcactcgcactgttttgctctgtgttggccgcctgaagcttccaatatcctttcttcttccggttattgcattttcctgaagcctagttttattacatgattgatcatctggacagacctcttcagactttgacacatctcttttgccaccaaatcttatctgctcctttgagtctctcttgcccagtctatagaaggggcatatgtgtggagagtctaatatgcaagttgttgtttaaataatattttctgataatattgatccattgagctcttttagatcatgctgggccaagcactgtcagccatctggtgggaagaccttccagatgacaagcatggcgctcattggttgaactgagaggggtcttttccttggccacttctccttgccccctcgactcttagcttgagctccagtctttttgagagcaccagtggtttctagttgtttagttggccatatgtgacgctatattggaaaggaagagaaagagagtatcagttgagtgctaggcatcacacatacattattttagttaaccttcccagctctgtgaaatgcagataacatctctaggctccaggaagatcagtaacttgcctaggttacacagatgccagaacaggaattcgaactcaagtttgccagcttccagaggccacattctttccattttgccacacgcacgtttaccatttacgatttactccattgtcagccttccgaaaggacttgagattggtgggactttgttagtgccaatcaagatgccactcgcagtgaatgatccctgttcctttaagaaccaggctgaagctgggctgttttgggacctttacaaaatggaacttttctgcctgacctaattgccaggatagccgactgagccaagatagttttgtgttcaccaagcaactgtggaccaaccttagcttcaggaaaacagtggtaaaaaaagatcgatgaggaacactgccaaagaaataccctttcttccccgactgaaagatggctttgtccgttgagttgaaaactattaagtcctgccttcctcacttttcatcacgtggcttctgtttttgaattccttttt

SEQ ID NO: 788 - DNA, 3422 bp, Homo sapiens
agcgcagccttgcttcagcgcccggtgccagctggctccttcgtctgagacgaaggcgcaggctcggggctccctgtcgccggtggctgggtggcgtccccccaccacgcccccacccctctactcacccaagaggagcctctccaccgagccctgcatcctgctgccctggcagccagtccagctaggcactggcccagttcactgtacctggacttacccactggcaccctccggatccccttatcaaagctgatgggggtcgctggggaccccccagccttttgctagagcctgcacggctgtgcgagcttgaaaagaaacatgaaggtgggctggccaggtgagagctgctggcaggtgggcctggctgtggaggatagcccagctctgggagcaccgcgggtgggagccctccctgacgtggtgccggaggggacactactcaacatggtgttgagaaggatgcaccggccccgaagctgctcctaccagctgctgctggagcaccagcgtccgagctgcatccaggggctgcgctggacaccactcaccaacagcgaggagtccctggatttcagcgagagcctggagcaggcctccacagagcgggtgctcagggctgggaggcagctgcatcggcatctgctggccacctgcccaaacctcatccgagaccggaagtaccaccttaggctctatcggcagtgctgctctggccgggagctggtggatgggatcttggccctgggacttggggtccattcccggagccaagttgtgggaatctgccaggtgctgctggatgaaggtgccctctgccatgcctcaatttcctctcctcccccacgcctgggcctctgccccccagtgaaacacgactgggccttccaggaccgagatgcccaattctaccggttccccgggcccgagcccgagcccgtgagaactcatgagatggaggaggagttggccgaagctgtggccctgctctcccagcgggggcctgacgccctgctcactgtggcacttcgaaagcccccaggtcagcgcacggatgaagagctggacctcatctttgaggagctgctgcacatcaaggctgtggcccacctctccaactcggtgaagcgagaattagcggctgttctgctctttgaaccacacagcaaggcagggaccgtgttgttcagccagggggacaagggcacttcgtggtacattatctggaagggatctgtcaacgtggtgacccatggcaaggggctggtgaccaccctgcatgagggagatgattttggacagctggctctggtgaatgatgcaccccgggcagccaccatcatcctgcgagaagacaactgtcatttcctgcgtgtggacaagcaggacttcaaccgtatcatcaaggatgtggaggcaaagaccatgcggctggaagaacatggcaaagtggtgctggtgctggagagagcctctcagggcgccggcccttcccgacccccaaccccaggcaggaaccggtatacagtgatgtctggcaccccagagaagatcctagagcttctgttggaggccatgggaccagattccagtgctcatgacccaacagggtcttcatgcccagcgcccaactctgcgctgcccttctgcaccacttccatgtggagcctgcgggtggcagcgagcaggagcgcagcacctacgtctgcaacaagaggcagcagatcttgcggctggtcagccagtgggtggccctgtatggctccatgctccacactgaccctgtggccaccagcttcctccagaaactctcagacctggtgggcagggacacccgactcagcaacctgctgagggagcagtggccagagaggcggcgatgccacaggttggagaatggctgtgggaatgcatctcctcagatgaaggtgtctgcctggccccagtttctttcctctgctcctcctggactgcaggcccctccttcgccccctgaccctgaggggctctgtgggcgtgggaagctctcctcccacagacacacccttgggtctctgataggtgttcacggggcccttgctgcatgtggtgccctgggccaggccgtgccaggaggcgcagaggcctaaggtggcctccctcctcgcccactccctgactcaatgggccttttattccttttgggaggtaattcatgcccacaggtagagcctgggagatgaggaatggtggctggagttggcccctgaggcccacggggctcctggtggccagtgctgtgggagctcagaggaaggcgaggcccctccctggaaagtcagagggggccccaggccattctcagctggggcttaaagggaagcaaagaggggatgagaagatgtgactgcagccaggatttggttgaggaatggtgggagaaagaactggaaaggtagattaggttggtggtggggagggctgcactgggaataaaatccaggggcctcaccatccagcaggctccccatggtcccaccctactgtgtgtcccagcccctgcctgctggagactcttactggcttcttctcctccgcaggcgaagcccgttctcccctcagggcctttgcacttatcccttagcctggaagggtctttctctggctctgcctggcaggatccttctcgttctcatctcagccaaatgctgggttcccagacaggccccctcccgtctccctatccggagcaccctcccctttctcccaccacgctctgccttggtgtcctctgtgattttcttcaaagcactctcgccatgtggagttgttttctttgcctacttgctttctgtcctttggtatctctcccatcccactggagagttgacttccctcctgcgggcccccacctccgcttctccttgctcacatgctgcctggctcttggctgacgctcagaaactgatgtgggctcaccctcgcaggccgggcactgcgctaggtgctgatgctgcacctcattcaaccctggcctgtggggctgcagtcaggcaaggggcagagcagttcaacaacccgtgatgtgcagtgacacgggacactttccctgaatgtgcactggagtcggctcttccaactgtagtccgctcctgaaaacgggaggggaagagccaactccagtgcagattcagggaaagtgtcccgtgtaagcgactactggagttgagagctgcagggggcaagggtggaggaagaagaggattcctggtgggcaaacccaggaggaaagggaacccaggaggaggatccctggaggagcgagagtaagagtaggaccccagagcaggcaggaggtgggcagggccccctgggccaaggacaggggtctgatctttgtcctaagagcagtgcaaaccattaaaggggtttgagccaag

SEQ ID NO: 789 - DNA, 2726 bp, Homo sapiens
ccccccccccagaaccccggggcgtgcaaggctcgcggctgctgggaaacgcccgctgcaatccccttgaccctgccctgtaactgacccttggggaaaagccccccgcacggctactgcgcatgctctgagctggacagctccagagagggaaatttaaaaacggttcgagctgcgacggcggccaaattgcggaacgcgaggggcgagcgcgagggagcccccctccggaacccctgcccacccccggagcgccggcagcggcggccccgcgaggatcggctccaggagatgatagaaagtgacacctcatccataatgtcaggaattattcgaaactcagggcaaaatcaccacccctctccacaggaatacaggcttctagccaccaccagcgatgatgaccttcccggggacctgcagtcgctgtcgtggctcacggcggtggatgtgcctcggctgcagcagatggcaagtggccgcgtggacctgggtggcccctgcgtgccacatccacacccaggtgccttggctggggtggccgacctgcatgtgggagccactccaagtccccttctccatggcccagcaggcatggccccccgaggcatgccaggtctgggccccataactggccacagagacagccagatgagccagttccccgtggggggccagccctcatctggcctgcaggacccgccgcatctgtactcacctgccacccaaccacagttcccgctccccccgggtgcccagcagtgccctcctgtgggcctctatggccccccatttggggtgcggcccccctacccccagccccacgtggctgtgcattcatctcaagaactgcaccccaaacactaccccaagcccatctactcgtacagctgtctgatcgccatggccctgaagaacagcaagacaggcagcctgcctgtgagcgagatctacagcttcatgaaggagcacttcccctacttcaagacggcccccgacgggtggaagaactcggtgcggcacaacctgtctctgaacaagtgcttcgagaaggtggagaacaagatgagcggctcctcccgcaagggctgcctgtgggctctgaacctggcccgcatcgacaagatggaggaggagatgcacaagtggaagaggaaggacctggctgccatccaccggagtatggccaaccctggtgagggccggacagcccgcagtgcgcgcacacacacacacacacacacacacacacacggaagaggaaggacctggccgacatccaccagagcatggccaaccctggtgaagccgatgcatacgcacgcgcacacacacaaatatgcgcacacacacaaatacacgcacacgcacacagaagaggaaggacctggctgccatccaccggagcatgggcaaccccagtgaggcccagatgcacacatgcgcgcacacacacaaatgcactcacacacctgtgcacacaaatgcacgcacacacgcagaagaggaaggacctggctgccatccactggagcatggccaatcccggtgaggcccagacagcttgcagcacgcacacacacacaaatgcacacacagaccaatacacacatgcgtgcacacacacacgcagaagaggaaggacctggctggcatccactggagcatggccaaccccagtgaggcccagatagcccacagcatgtgcgcacacacacaaatgcacacaaatgcacaaacacacacacacagaagaggaaggacctggccgccatccaccggagcgtagccaaccccggtgaggcctggatgcacacacacacatgtgcgcacacacacgtggaagaggaaggacctagccaccatctactagagcatggccaactctggtgaggcccggacagcccacagcgcgcacacacacacgcacgcacacacacgtgcgcacacacaagtggaagaggaaggacctggccaccatccaccagagcatggccaagaggcccgggcagcccctagtgtgtgcgcacacgcacacatgcacgcacacatatgcatgcacacacacaccacgcgcccctcctcccagcccagccccagctctgcctatgccctacccagtctccaacacttctcagccaggatgatgggaagacaggcgtctggcaaacctccctccctcctatgaaataggcctccccctccccaaccctatccagtggcaggagtagtagaggggcctgatcaaaaacaggaaaagctgttggatctcacttgtcatccatagtttcttgcccagaaatgccaaactacacaaccatgggttacacattgctttcctaccacattgtcagagatgtttaaaatagtaacactcagtgtgggctaggatgtggaacaatagagagcttcgtatataatggataggaatttaagctgttaaactttttgagggaaagctaatatatcaaacacctgcaaatggtacccatggattggtccaattattctacttctgatgatgtgtactgtgaagagcaaagatttgagcagaaggtttgtgaacaaagttatccatcacaaaattatttctaagagtgaaacacagaaagcagtccagacatctcacaataggggttggttaaataaatagaatggcataccatgcaagtattagaaatgagaaatattttaaaatatttttggaacataaataaatgttaggc

SEQ ID NO: 790 - DNA, 3956 bp, Homo sapiens
ctgtcgcccaggctggagtgcagtggtgccatctcagctcactgcaacctccgcctcctgggttcaagccattctcctgcctcagcctcctgaatagctgggattacaggcgcatgccaccacgtccggctactttttgtatttttagtagagatggggtttcaccatgttggccaggcttgtcttgaatttctgacctcaggtgatccaccctcctcggcctcccaaagtgctgggattataggcgtgagccactgcacctgacctcaatccttttttttttttttcctctccttcattttaggtaatttgtattgacctgcttacaagttgactgatcttttctgccattatttatttttaaattctcaactttccgtctgattctgctttagaatttccattttttcttctaaaactcccatctcttcaccaattatataatcacatttatttatgagatttaggaaattttaaagcaaagaaagattatcaaaggtatccatatataaataaacaaaaaactattgttcccagagagtagttgttttagtcctcttgtgttgctataaaggaatacctgaggctggggaatgtaagaaaaggggaatacctgaggctggggaatgtaagaaaagaggggaatacctgaggctggggaatgtaagaaaagaggggaatacctgaggctggggaatgtaagaaaagaggtttatttggctcacagttctgcaggttgcacaagaagcatggtgctcgtatctgcttctggtgaggcctcaggctgcttccactcatgctggaagacaaagaggagcccactacatggcaagagaggaggcaggagatagaaggggaggcgccaggctcttccacaaccagctgtctgggaacgctcacaggagctcagagcgagaactcattcattatggcaaggacagcaccaagccattcatgaggggtccacccccatgacccaaaaacctcccattaggttcctcctccaacaacggggatcaggttttaacatgaggcttgatgtggccaaaaaaccacatccaaaccatagcagtagcccagcttctcttttcactcattgtgtttgttgccaataaactctgtagcctcaaaagatgggaacttttccttttgggtgttgtggatcccatccatgaaaccgaaagtaagtgttgagcagagcaagctgtatgtaaaggccaaggaatgaagaagcaggagtgtggctcacaaatcaacttctctactcctgaggggtgaggggattgaaatagagggtttcttgaatgaaggggttggacattgaaagcaaggggaagaatattcatggcttttctggaaatggacggtgaacttctgggagctgaagcactgccatctttttgtccttttacggcgtcttcccgtcattgtcatggtgattgtcagccgctgtggcactggtgggagtgtcacggagcatgcaaatgaggttgtaatgaagttggaggccctgcaaaggccaggtggacttccacttagcatcctgctggtcttagctggtttaaccaagaggggagcctctgacctcaggcatcctattgctgaagataggcagagtttgagttgtgcaactgttcagccaagcctacaagatgtatagtgctgtgggggtaacatggcctccctacccagcctcgcttcagaactttcgtaccaaggctggactgtagaaaagtccttcctatgccatggcactttcccactgaggcctcccatgggtgccgtttcctttgctggaaggttctcctcgactcctggcagtctatactcatttaaaggtttccgccttctctaaagcctctcactgctggacttcacggtggatcagatttcccttttataaacattcatagcagactgtacatttctttcactgcgtttaccaaacgatttgatggcgaagtgcgtcagggcgtgggccttctccatcactagcgttccttgcaccccaggagctcaatccgtgtttcctaaatgaatacttgacatttcgcttgatcgtatatttttgcacagcagtgatcttcacgacctttgattaggcagtggcttctcagatacgacaacaaaagcataagcaaccaaaggaaaaaattaattggacttcatcaaaattaaaaactttagacttcaaaggacattctcaaaaaagtaaaaaacaaccataacctagcaaataatacatctgataagggcctaatatccagaatatataaagaattattacaattcaacagtaaaaagacaatccaattcaaattctttaaaatgtttaaagaatttgaaaaatcttccaaacaaaatacgcaagtgaccagtaagtgcatgaaaagatgctcaaggtcattaatcaccagtgacttagtcaccaatgactaatgcatcagtcacttgaaatgcacatcagaacctctgagagctgccaggccacacccagtgggatgactgtaatcagaaagacgggcggcgccagtgaggatgcagggagactggagcctcgtacacatcgccaggggaacaaaaacagtgcagctgctgtgcggaaatgggaaggcagttcctgaaagtgggacgtagagctaccatgtgacccagcatttccaccctgaggggacactcagaagacagggcagatccccagtgacatctctttcccgttggggtttgcttttgtcacagtctccaatagaggtcatcattcctggtgccagaccagctacgatattaccatgcgtgtagcgttttacccgtgctggtatagaggactctaagaagtggggcatgctgtttctggtgaaccagctgtttaaaatctacttcaagatcaacaaactccatttatgtaaacccctaattagagcaattgacagctcaaacctgaaagacgattacagcactgcacagagagtaacatacaaatactacgttggacgcaaggctatgtttgacagcgattttaagcaagctgaggagtacctgtcatttgcctttgagcattgtcaccgttctagtcagaagaacaaaaggatgattctgatctatttgcttccagtaaaaatgctattgggtcacatgcccactgtggagctcctgaaaaagtatcacctgatgcagtttgcggaagtaaccagagctgtgagcgagggcaacctgctgctgctgcacgaggcgctggcgaagcacgaggccttcttcattcgctgcggaatcttcctcatcctggagaagctgaagatcatcacctacaggaacctctttaagaaagtgtatttgttactgaaaacacaccagctgtctctggatgcttttctggttgccttgaagttcatgcaggtggaggacgtggacattgacgaagttcagtgtattctggctaacttgatatacatgggacacgtcaaaggctacatatcgcatcagcatcagaagctggtggtcagcaagcagaacccatttcctcccctgtccacggtgtgttgaaagtacacggagccccgaggacggcctgatgaaaacctggaattcctttttcacagactcggctggttctggagtctttgtgagacttctttgaaggaggctttgcgtgaaggctgctcggctcacttttcctaagtgtggttcctgaaggctgtctttgtaactttttgtagttctttgtgtaaaaagcgtattctgaatttatacacatggcatgttcttcattatatcttccaggatacatctatttttatatattaaatttgaatgtgttatcaaaatgcttggttaacttaaggcacctttttaaaagcagaatttaatttgatttaaattttccagattttatagcttgcctgtatggatgctcctcaatttatgatagggttacatcccaataaacttattttatttgc

SEQ ID NO: 791 - DNA, 3577 bp, Homo sapiens
gaatatctttttattttatgtttcttatggtgcagaaaaacattttatcttgtctgttctttcatatattctccctcagtatatctcacggatgtgcgctgttggaaagtgaaaataatcttacaaattgagatctttcattaaatttcaatgaggtacctgtaagctacacacattggccatagattgactgaagtcctattcttaagatggaagattctagtatgatgtcggacttaaaaacttaaccagattagatattgtagaatacaatcttttacaaatgagttgatttttctctccaaaccttttgcaaaatttccgtaagagagactcatggacttggaaaattctctgtgaagctgcttttggcaaagtcctggcaaagaaacacttttgctatttcagatcctattctttaagcctcaacttactattcttatttcgtgctattcagttttttactcttctgaggtctctatgaatctccactgttttggatctctgagtacttacatcattcccactttaagacttgtttgggtattcttttttaatttattttttatttatttatttttgtttttttccccatccagaactcatgttgagtggttggatattctcgtggggtgcttttgtggtttcttgacttgttcctaactaaagtcacaagtgcatacaccttgatagcaccaaatataaaccggagaaatgagatacaaagaattgcggagcaggagctggccaacctggagaagtggaaggagcagaacagagctaaaccggttcacctggtgcccagacggctaggtggaagccagtcagaaactgaagtcagacagaaacaacaactccagctgatgcaatctaaatacaagcaaaagctaaaaagagaagaatctgtaagaatcaagaaggaagctgaagaagctgaactccaaaaaatgaaggcaattcagagagagaagagcaataaactggaggagaaaaaaagacttcaagaaaaccttagaagagaagcatttagagagcatcagcaatacaaaaccgctgagttcttgagcaaactgaacacagaatcgccagacagaagtgcctgtcaaagtgctgtttgtggcccacaatcctcaacatggaaacttcctatcctgcctagggatcacagctgggccagaagctgggcttacagagattctctaaaggcagaagaaaacagaaaattgcaaaagatgaaggatgaacaacatcaaaagagtgaattactggaactgaaacggcagcagcaagagcaagaaagagccaaaatccaccagactgaacacaggagggtaaataatgcttttctggaccgactccaaggcaaaagtcaaccaggtggcctcgagcaatctggaggctgttggaatatgaatagcggtaacagctggggttctctattagttttttcgaggcacctaagggtatatgagaaaatattgactcctatctggccttcatcaactgacctcgaaaagcctcatgagatgctttttcttaatgtgattttgttcagcctcactgtttttaccttaatttcaactgcccacacacttgaccgtgcagtcaggagtgactggcttctccttgtcctcatttatgcatgtttggaggagctgattcctgaactcatatttaatctctactgccagggaaatgctacattatttttctaattggaagtataattagagtgatgttggtagggtagaaaaagagggagtcacttgatgctttcaggttaatcagagctatgggtgctacaggcttgtctttctaagtgacatattcttatctaattctcagatcaggttttgaaagctttgggggtctttttagattttaatccctactttctttatggtacaaatatgtacaaaagaaaaaggtcttatattcttttacacaaatttataaataaattttgaactccttctgtataaatgggtcatttttatttttaatgaaaagttattggggttttctctcttgaagggtctcattttaattcccttttccaggccgtatagatcaaatatagtactgtcattactgttggctcttgttttggtcttgacttactaatagtgttaccctgattttcagagggggacagtttatctccagaaaggccaatgtttgtatacacatcagctagacacaaatatagacatcatatgtagtttgtacatgtttcagaaacttgttttttctttgctctgtgtaacctatttcctattgctagttcagttggctttcttattcacttctgtgaccctgaaccagttctcagaccctagagtgtaagagcattgattttctacgctgtgtaatctagctcaatccctctgtcccctccgcctcaccgtcccccagccaccacattgtatagcaaaagcattacattcaatcctagaataaaggtaaatacaacaaatcatctttgcagctggacaactaataatactttgcagcattaagagatcttctgtgttaccagtcactctgttgaaatgaactttccgaatctctttattcaggaaaacatggggttttgaaattcttgggccaagagacataactgaggggttcgcagagctaggcaagggtgcactaggaaagggccacattggtgggtggggggtaacagagaacagatggtgtcaggaagtttctctggagtaaataatgtggatattcttggtttccctctcctccgccagctgaagctgtgttagtgctgttgacactaatataaaatgtttggtccatttgaaatccttgtcattgccttatatgggggaaactcaatcccccagcctgtgttggaaatatcaccaaactgattgtaaatgtgcggctgtagcagacattttagtgtggtggtgtgcagccatttcggccctacacctgccagcctggctaccttacagttgtgttccgatttttgcgtctatgcttggtgtgcctcacttgctgcattttccagcatgcaaccaggagttgacgtaggaaaaagggatgctttcttactttggaagctctcagggaagttggtgtcaatttctcctccactgcctggcctaccctgcactcccaaagattttgtgcagatgggtagttccattttttaaaaattgtgcagatatggaaaattgtgacttacttcatgaccagaactatctagaatatgtgtgggggtataaacatcttgcttaaccaaatatctatgtaggcagaggtaaccaggagagaagcaagacttgctgcctaaaggagcccaccattttacttttcacatttaatctgccacgttgaatcaattggaataaaacctgactcgcaggtgactggacaggaaatcccaaagttccaccatttctatgcttaattttaatgtccccccgcttttttttttgtagaaaataaaaacaagaaaatcgttccaatgtaagatgtttgttatagaaactttaggcaatacaggtgtgtaataaaatgtttaataaacttctaaacacttttgtatttggattta

SEQ ID NO: 792 - DNA, 9989 bp, Homo sapiens
agtgaccttgttttaaggacatgacatggaattcctggaaccgggatccgttttgaagagtcagtggtcctaagttgtcatcaggcaggggaccaggttctgctctgtgcgttggcctctgctccagcctgtgcaggctgtgtggacgagtgccacctgcatcagcgggcacctcgcaaggctttgttgagctccagtgagtagcccacttccatctgcccatctggcttggactttctgtacttatcttagtcccatggctgtgctcctgcagggccaggcagatgatggcagccgacaatgtgcatctcaaagggacgaccacccgaggaaggatccacaggaaatgtcgcagggggtgggtcgtgccacagcccctggaaacgagccaggatgttgcccttgatcttgcctgcattctggctttgcacattgagggagctgcttcggcccttcccttggtctctggctgtttgagctttatatagagagccgagtaggagtcaactctttggggctgtctcttgtgaagtccttcttaccacgcgccatgcctttctgggcagtgcggctgcatctttcacacatggctattctcttagcagtttcttaccctgtacagtttaaaaacaaacatcttacctaacctggagtgctttctacatgcccatgacacctttctccttacagaggatgaagaaccacggaaaaacttggggctccgatattgcgaactccctaaattctcccacctcctttcccacataacctgatgctcagcctactgctgacaagcgtcagcccagcggaggcccgtctgctctgccttcgtcatttctagtccccttcggttatgtttcatgttcctcattctcacaagaaagaatcccttcccttctacagatggacggcccgtctgtaggctggtgccatccttcgaggtcagctggtgatacacactgagagggaacctaggtccagaatgtgcttgtcaggaagggtgtgcagcccagggttctctccgtgttcactgcctctttcctttgtcatcttcattctgccgttgagcctatctagtgggtttttacaatttcagttactgtatgtttagttcgaagttttccatttggttctcctttataccttctgtttctttcctgagacttctcatcattccctttatgttaagaatacccctccttacttcttggagtgttttttgtaatagctgctgtggagtctgtcagctaattccaatgtctctgttagctcagataagatgttgatcatcttttcccatgcgagttgaggatattcaccttctttgtatgctgagtggttctggattggtcctgaacattctgaatattacgttaggaagctgtggttcctgattcagtcctctggagagttgttggtagcttggttgtggcaggcactccaccagcttgggttcaggttctcagtccctaccattctgctgtgggttttggtgccgttttccaagcctttgtccactcttcagatctgtccactatgtagcactccatggcctgtgtgggccccgggcatgctccgtcctaaccttcagtgctcagggtctgtgcttgagggctctgtttacatatgcctcgctcagggctgagcccaggagctcgtaacaacttgatggggttgttttcccgagagctcctccctctctgcaatctctcgagcactttccggtttcctgggcctcctatcttcaccccttcagccaggaggcagggcttcagttatcagctctgccacgcttctcccgtgactgagcttacttttgtggccaagcaagaagaggacacggagaaaaaaagccagcgggtttttcaccctctttggaccaccgttcctccagctggaaaggaaggtttcctcagagcttcagacacctgcaggctgacccctctgctggcactgtcactgttgccaccactgccgctgtggaatttcctggggaccagggcaccagagagacagggagaaaggaaaaaacccagggatctggcccactgtctcagaaccaggtgacccctttcctgttactagatgcttctcctggagcccccgggcacactcttgctcgcctctggatatcgagttgtatttagtccaggctggggataccagggtcagggacatggcaaactcaccgcaaccttggtggcacttcaaattctggtcttcaacccccttctacctgctactggtcaattctcagaggcctcagtagctcctttgtgtgcctgtctagccttttagccacattcagtgggcagggaagggtggcgggggtggtgcttaccctgtggagtaaccataaggaaaccagaaccataaggaaatgagaagatgtgttttaaaggccttaaacagaaacgtctgggattacaaacagaaatgaggaagtcaggaataaagtaaagggtgaatgattaggtgagagtgagcagaagcgcctgatatgcaggatcctgtgggcctctggagcccatcccctaactccctcacccatctttccatgtgcaccttgcagagggaggagggaagccctctgcacccaccccgccttccaggttgagacaaaggcttcgaccgtcagcacgcgagcctatcctttccacggggagtgtcagaaagatgccgtagggccaggtgagctgctgtgaaggactcattcttggtagccggcagttactggcaacttgtgagcttggtgggctcctactaacgcacctgggacaccaggctgctgggctcccctctaggcagcctcccctccaggcagcctcaccagcagctcccctgagccatggagaccccagaggtccccgtgggctcgctaatcgactttgggcctgaggcacccacctcttctcccctggaggcaccaccccctgtgctgcaggacggcgatggctccctgggggacggtgcatcagagagtgagaccactgagtctgcggacagtgagaatgacatgggcgagtcgccctcgcacccgtcctgggaccaagaccgccgttcctcctccaacgagtccttctcctccaaccagagcaccgagtctacccaggatgaagagaccctggcactcagggacttcatgcgtggctacgtggagaagatcttctctggaggggaggacttggatcaggaggagaaagccaagtttggagagtactgcagcagtgaaaatggaaaaggccgggagtggtttgctcgatacgtgagtgcccagcgctgcaactccaagtgtgtctcagaggcaaccttctaccgcctggtgcagtcttttgcagtggtgctgttcgagtgtcatcagatggatgactttgggcctgccaagaacctcatgaccatgtgcttcacctactaccacatcggaaaaccacagctgctgcccccggagtcccgggagaagcccgcgggcagcatcgactcctacctgaaatccgcaaacagctggctggccgaaaagaaggacatcgccgagcggctgctgaagaacacctcggccaggactgagaatgtcaagggcttcttcggggggctggagaccaagctgaaggggcccctggccaggaggaacgaggaagacgagaacaaaccccaggagaagcggcccagggctgtgaccgcgtacagccccgaggacgaaaagaagggggagaagatctacctgtacacgcacctgaagcaacagcccatctggcacactctgaggttctggaatgcagccttttttgacgctgtccattgtgagaggacaaagcgatctcccactaccagaggggatgctggagaggaggaggagaagagggagaagtggtgccacatgacccaggaggagcgcgacgacagcctccggttcaacgagaacatcaccttcgggcagctgggcacattcacgcacaacatgctggcctttggactgaacaagaagctgtgcaatgacttcctgaagaagcaggctgtgattggcaacctggatgaagagcaatacaagctgcttagtgaccacattgagcaaatggccactgagtaggccccagaggtcgcactccgcaggaggactgaggccatgtgccattctcccgggcccagcgcccggccgtcaccccacccgatgacctgcatgaagccagcagcacccagagccactcctgctgccctagaactagcggttagaagaatccgctgttcctccctcatctcctctgcctgtgtctgcgacccccatccatgtgccaaagtgtcccttgggtcacacagctaaagccgaggtgaccagttgtaccccgagtgccaggcttgtgagatgagaccaagagggaggaggggaaggactccatgggccatcgtgggccaagggctggcgagggtgggggcgggcaagggatgcaggcaggacagccatgaggtggggctgcagccggcacacccagtggtggagggccggcgctgccactcacggtgggtggccgtgggccaccttccctgcaatgggtgcacacgcggctcccatccagccctctcagcgtggggctgtggctggtcctcactattccccagtctcccgctgtggggcaggaacaggaagtgacgggaaccttgaggaggaaacgcctgtgttagggagagagtgggtgcggtgtagaggatgctcttggccggctggagcaagacctggctcccaccagagggacgtgtgtgtgcctgcagacggcccgggagctgtgtgtctccgccagagtcacagcagtgccgaggtgtccgcggcagaccacacagaccgtctgaaatgcgcccgcctggcggacagctcccttctgaagcagagaagcctccatggtcacgaagcagcgttgtgctgtgtgtccctcgcaagaagcacaggaaagagaagtttctttagtagccactagacaaccaccctttctgaaagcaaacagtgctgctctttattccagacaaggcaggaaagtctgagttgggagtgacagtggctggagagaagcagatctgtgcaacgtgcagggcaagccagtggcgtggcctctgcctctaagcgctgagcattgggccccttccccaccagacctttgtagctcctccagcctctgcagagactcccttcacctcgcacttactgcctgggaaccacggcccttctcttctgtgggtctgtaccaggtactccaggccagcccatgggcccggggcctgaccccaacacctgcatgctgggtccagagccttctgtttcaccgtgcgtggacactgctaggccgcctggggtcccctgcctcctgcctgtcgctgccgtggtccctgactgcgaaataggcccgcggggctctccctcctcctgccatcctcccctcccgcccttcctggctacctcctctgacatgcggtcagataagtcccgtcttgtttgtgagtaccacagaaacgcctgagagtcacttacccggccactgcttggaaggtttccctccggggaatgcctccctggaatgttccagagacggaacattctctagagacaacagtctgtgctgcagattggttggatcacagaatgtgtgtctggggcattatctgaaacgtggtgtcatctgatgcatttggaccatatgctgccagactgcagaacgggggagccggggctcagggcccctgactgcatggtgcatgagtgatctcagcctagcgatgccgctggccagaccgtgaccatgctgccagtgtgctcgccatgagctgggtcagggctggggagttgtgcaggctggggtgacccttcccccatcattgggccccaacgggcatgtctccaccgaatccatttagagaaatgtcagagcgagggttgtgtggacacccctcgctctgatgccaactgcagataatacacacctcctgcagcgtccagccacggctccagggcactgctctcctccttgcaccggtgaaactcaggccacactcaagggctgactgtccaggcgctcccttcagccgcctcgtcgtcagcgttcttagtcatgcattattcgtgttagctgaaatgcattcagactttgttctgcggtgcccacaggacttacccctgtatgtacaggatttttgtatgaaagttttgtttgattctgagactctcttgggaacgctggagagcttgtgcacagcctctggaaggaaaggcagcgctgacttcgttgggcttttttccaagcactttaacttcagaaatggtcttgacacttttttctccacatagactcttgaaatagccatttcaggggaggaaagggttggggttttctttgtttgtttgtttgtttccccctttactacctgttcttgtagatctagctcctcagagttggaggaaggctgacagagaaggtctcctctgtgctccatccacacaggatgccggagagacagccccttgtgctgtgagcagagcaggcagtggctctggaggctgcctgtggtctccttccggctgtggctgacagtggctctggccagggttgcttggagaaggctcagtgtgcctgggacagggcttaccacctgccaccaaggtttcctctcttcccccaggacctgggcagagcaggcatgagctgggctgtggtgcagagcaagcagacccagccacactgctcaaaggtccctgcgtggggaggtgtcacaccaggggcacacccagggccacctgggtgtaggagagctctggtggcccctccgtaaactcaggaagtgtcaggtgatttcctagggagaggttcccagtcccagcaggcagaatgcccaaaaccaggagcacgaaggcctgtcatccatggggccattgcaggcactctgccgcccgaccttgagggctgtgccaatcctagtgaaccaaaatgcaaacaactcacacaagtgaaaagctccctgctttgaaaacaggacatgttgacaggcagcatggtatgtttttagcctttgttacagttttagcaacattgatgtctaagaggggccgtggtaatagattgcatctgccctgtgcatgcgcatgtttaaccacaggccagagaactcaattctgatgtcgtaagttctctgtaagtgaaatggggtagactgtatgattttcctattgccaaaagaaagaaagggggccaaacagctctgaaatttccaaaaaatggctagagggagagtccagtttctgagctctgtacccaaattaaaatcctgatgttcaggttaatccaagcaacacgcattgggtttaaaaccagcaccgaggcccagtgggggaatcacagacatcaccaagtctcgtcttctttccttcctgtgagttgaaaccaaacaggcctctcgctcactcctcccagcccagtaatgctgaggagttcagttgtgaggaaagaaggctggagctgtgagattcgcttttccctaggctgttccgcgtgggttaccttatcaccctggagcacttggtattccagacccctgacatgaggaatgcaggttcacactgtaaagagtttgtgaaaggtttcagtctaactggggttccttagctggaagccagggctggaagctacaggcctgaccttcctgggtcccactatctgttggcattttttttttttttttttttttagacggagttttgctcttgttgcccaggctggagtgcagtgacacaatctctactcactgcaacctccacctcccgggttcaagcaattctcctgcctcagcctcctgagtagctgggatgacaggtgcacgccaccacgcccggctaatttttatatttttggtagagatggggtttcaccatgctggccaggctggtctcgaactcctgacctcaggtgatcccccccacctcagcctcccaaagtgctgggattacaggcgtgaggcatcacacctgcctctgttggctttttagttaggaaggatccagctaggcccgtgtggttagatcagctttgttactgaattacctaaaaccagaccacagcacagccagggagcccagtagtgtttccaagaacagtgtggagcttgagaaagagaactttaaaaattagagggtccctttctgcagaggaagggatgctcgcagggtggcagtggcccagccccagcctcagggacggggagggagagccccctctgggcccagcaggcaggtgttctgaggctggtccctcctcagtttccgcagccacaaggcgaaacggccagattctcactcaaggtcgttctcactccttttcctgtcccgtttccagtcccactgagccattcacttctgctgaaccatttttcttaggatgcagccgtctcactcccttgtcctgtaaatcgtgtattcatgttgatgattcttggagataggtttcactttttcccagctgcgtccacaggaaaggggagtcggatgccagctgcaccccgcctggctcgcacaggctaagaccacagacagagcagggcttcccggagccacacaggccacgcaccccaggaacccttgctgccgcgggccaggaacaggaatgtgttggtgcctgagacaccaaatggaagaagcacatcaagactgttctcctgcggccaacactggcccggaagccgccctccatacaggccctcagggggcctgccttctgcgcctcagtcccccgtgcatccctgggcctgggtatcacatgctctccaggaaagggacggaatcaatcctgtgaccgatgggctcgcaaggatgggtgccgccgtgggagccctgcctctggtgctggcaagggattgggtttgtgtgggtgtctctagcctgcagagtgcagtgagtgagagtccttgggagcgcggcgctgcctgtagctgtgcctggggatgcacgtggccacgggatttcagtgggacagcgctcccacaggggctgggggtgggggtggggtttcttagttactgttggaaagggaaaaattcaccatatccaaggggagagacgatgggctgggtttgtttactccaacttcccttctacacccctcctgcaggacagtacgatttggggagaacccagctccccactttatctgcagactctgggacctgacaaaacagtcagagcctgagtgcactgcagcctgaactcccttgagcagcgctataagggactttgcactttaaaaaggggatgcctgtcagtaaatcccctgtgcattgactagaactggggggctgcgcccgctccctccttaatcctagatgatttgctcatgaaatagaggtgggggacgaccgcatgcactctgggaggtgcagccctaaggggtggactccagatctccctgcaagagacagcttggcttggctttggctgttggggaggagtccctgccatcccggtgagcctggggctgttgcttagggtcttctgggtggacacgtggagaaagagaaggcaaacgttggaacactaggaaaagctagaaattcagacaacacacatggatccccttaaaacatgtaaatgtgtcagaacacggttgacctgccgccttcttgaacctggtggcccccgttggaactatcagtggcgtctcccatgcacacgccctctgctttctctttcctagactcgcggtgctcacatccagacattaccttgttggtagcccccaagtggcgtgcagtgacaccagtatcttctctgttgcatttttgcaatcttgtgtcccgctcggtgatgttctacaaactctgttttaaggttgagaaagtttcaagggtgaagatctcaaaacagtgctaaaatcaaaggtgtttgctgtgaagaaaaacatgtgtatatattgcaccttgagttgtcagaaggtagaaactgaaataaactaactttaaaaaaaaaa

SEQ ID NO: 793 - DNA, 6223 bp, Homo sapiens
ggtacggatgccgggaaggggagaaagaaaggcggaaggggtcgttaatagctgaggcgaggtgcggagtcgtggagggggcttaggaagtgaccagcgggagacgattgcctcgagctggagagttccatggctgagagtaggctccgggccccggacctaggagtttccaggtgtctaggaaaatgccagaagaactcaccaggtgccaggaagcatcccttttccggaaagtccttttacttggatctgcctgctggcaagaatctccagtttttgacgggggccattcagcaactgggtggggtaattgagggttttctgagcaaagaagtaagttacatcgtgtccagccgcagagaagtaaaggcagagagcagtgggaaaagccatagaggctgccctagccctagccccagtgaggtcagagtggaaacatcggccatggttgatccaaaaggcagccaccccaggccttcacggaaacccgttgactcggtgcctctaagcagagggaaggagctgctgcagaaggctatcagaaaccaggtgagctggggcaagatgggacagagccggtggtctccagcatagggagggatttcactcttcttcccaggttcttctgaagcacccacacaaaatgcacactctgcgatatgtagtattgtcattatttccttcttctacatcaggtagtggaggctcagacaagttatttagccattcacctagagagtaagtgttgaagccagagccacctccaactctggagcctaccaagagaactgtggggatgtgggatgtggcgggacagggttgctgggtacagaagccagacttcttttacaagtaactctaggctgggtgtggtggctcacgcctataatcccagcactttgggaggctgaggtgggtggaccacttgaggccaggagttcaagaccagcttggccaacatggcgaaaccccatctctaccgaaaaattagcagggtgtggtggcacgcacctgtagtccccgctacgcaggtggctgaagcagaagaatcacttgaacctgagaggtggaggttgcagtgagccgagattgtgccactgcactccagcctgggcgatagagctagactctgtctcaaaaaaaaaacaaaaaacaagtaactctttattccttgtgtgaaaatccagggctgttaaagtttagtggcaggaggaggagttaaggtgatcttgtgagaagagtcatgctggtgacatcaggaggggtacatggctgtgatgggggaggtggtgctgctggactgagccagtggagggggaagatctgcagctagcatagtttcatgctcagtgaggatgatggtcaccgtgtttgttgtgtacttactgtgctgagagctttcctcgcagaggccctcccaacgaacagctctctcagaagcatctgttccttcctggtcacgaggtggccagagcacaatgtataggcagaccagtggtccttcctctcccaatgtggccatgtggaggacaggatgtcttcctgggggttgggatggactctctgggcactgtactctctctcctacctgcctccctgcagtccctcccatggatgactcaggcctcccagaagcaatttctatctgtccccttcactttcaggccttggggagtctctgctcctacctgactctgtgttgtaatttcaggggagcatcagtggaggaggcagtgggggcagcagcagcctcctgaccaatgcccgctcttggggagtgaggattctgcacgtggatggtaccctttctgtgctgggctcctgtggagggagaattggtgactttgaccaggagtgtcagcttttagaaggatcatggtcatgtgagcttctggtcaccggaagccagaaatactcagctgccatgttgatccacaaaggtgggaggatgtggggaagggggaaagcggtgaggacgcagagtgcaggctgtggcctcggcatcccgcaggaggtccctagaacatgccgtttcatgtcacctgctacagctctcccccagctagtatgatgatcctgttttacaaatgcagaaatgatcttaatattcatgaccactggccaggcgaggtggctcacacctgtaatcccagcactttgggaggccaaggcgggtggatcacaaggtcaagagttcgagaccagcctgaccaacgtggtgaaaccccgtctctactaaaaatagaagcattagccgagcctggtggtgcgtgcctgtaatcccagctactcaggaggctgaggcaggagaatcacttgaacccaggaggcagaggttgcagtcagccaagatcatgctactgcactccagcctgggtgacagagcgagactccgtctcaaaaaaaaaaaaaaattcggccaggtgcggtggctcacgcttgtaatcccagcactttgggaggccgaggcaggcagatcacgaggtcaggatatcgagaccatcctggctaacacggtgaaaccccttttctactaaaaatacaaaaaatcagccgggcgtggtggcgggcgcctgtagtcccagctactcgggaggctgaggcaggagaatggcgtgaacctgggaggcggagcttgcagtgagccgagattgcgccactgcactccagcctgggcgacagagcgagactccgtctcaaaaaaaaaaaaaaaaattcatggccacctaacaggtattgactctgtgctacgaattacctcatttaatcctcactacagtcctgtccccattatacagatgaggaaattgagcctcaaagggattaggcaaattgtccatggtctcaccagagtgtgtagtgtggcccaccactctcagttttactcagctgtaaattttgtgctccttcttttttcacactgtaaacaacctgtttgcagcctgtttacactagaatagttgtcttgaaccaggtggcagtgagtggtttcatacccagctccattcttgagtctggagttttctgtgatccattttagaggattggtccagatgggacagcccataggtgctgactggggcgctgccccaccccttggtaccaagatcttccaggggagtctagaggctgtacaggggaagttcctggtctgggatgtggagggcttcatctcactgaaaaatcagccatttctgacttgatttccttccctgcctttctctgttagaggagtgctagcatgtttagcccttgctggtctttcacctgagggtacagctgagtagttcacacagcatggcctccctcacagccacagctcttcagtggtgccttaaagtccttagcaagccatgaggcaccttctgttcaaagatgagttgtattcaatgctgcaaaagagcatgacacccgctcaggtgctgttccagggatagaggacccagtccttaacctccgctgtcaggagatgcagaggggatgtgtagccagaaggtggcaggcaaggctggagtgattcagtgggctggcccagcgagtttagtcctgcagcccaggaaggggctgtgctaggtaagtgaagactggaagcctttggcacaaaccctctgtcttctccacagaaatgatgatgcacgtgcaacagctgtctcttgcgtctttatgtgtgaaaaaacaacagccaaagaagccagagggaacatgtccagcagcagagtcaagaacacggaaagtggccagactgaaggccccgttcctcaaaatcgaagatgaaagcagagaatccaaggatggagagccaagcccacgatcagctgcccacaccatgcccaggaggaagaaaggctactgcgagtgctgtcaggaggccttcgaggagctccatgtgcatcttcagagtgcccagcaccggagctttgccctggaagcccatctatatgcagaagtggacaggatcattgctcagctcagccacagctttgcagacatccctttccaggctggcctccccaggtggtcaggttccccagcttctgattgtgaccctctctgtcctgagactctgcacccccatcagccctcccatcccagggcagcatctcccaggataaggaaagaagacagctgccaggcatcaggtatcccagagcaggatgggacagtggacagcacgcaggcaccagctgaacgtgcagggactggtgaggtacctggacctatagcaagctgccaggacctgggggtgtcagttgatgtgtttgtggaccccccagggataccagtgtccaggagccctgcttgccaatgcctcctgcctagctctggttttatggaactctcctctggcccagacctggcactttttggccacaagcggaaggttcagttccccagtggcagtgctaagaagagagtgggggcctcctggccacaggcttcattttttgtcccaatagcccccaacccctgcggcaccaggacaactagtggcaagcgtcttccctctcttccccttacaggccatgagtccaggctcctcgcctccctccagcccttgtgccactcacagacctgcctctctctcccagaccccttcccctggcagcccacagacagaccagcagagttctgggccacacagccctcctggctggggaaagggtggcccccagggcctgaggattctgagtgtacagccactggccctgtatcccaggaggctggccagctcctcagctgccccacagctccaggctggccatcagctcccctgtactcagctaccagtgtgcagccctcgggagcacctgtagagagcaggtctacctccctcctgcagcccctgccagccagtgcgggagccagctgttcccgatgcctctgggccccccagcctctccaggtgccctgtctccctgtctcccagccctggtcccaaccccagccccagccccagccccatgctggcagagagctgctcctacgagtccccaaggtgcttggctcttcacagggccaggcagctccagattgaagggccacagatacaacttactcctctgctgggtgctgcacacccggccagggctgaccaggacgcaggaggggcagaaccccaggacttccccaaaagagctagaaggaggcccgggcctggcctttgaagtccagcaagcagctgtcacgctcagctccatggagctgacagagccacccctcccactggccaggtctttgggagagaatctgggctgggggctgccctctcctacccctgcctcctgccatgttcctgaccaggcagagtctacagtgggcttgcccagctgaggctggccgcccacgccaggaggcagaggcgaagttggcatggggagggaccacaaaggagctggggcagcaggagtcctggcccggcttcctggccctccacaggcccttgcctctctgcagagccgcgggttagctgttggtgtgctccacccccaaccccggcctcctttctcacgagcatgtggccgctcctgctttccaaaatgactgtgtttgtcccctcccccagccccccacgctcccgcacacagatcctcaggaacatatgaagcagaggaggggcttgggctgcaccactcacagagctccctcccccaggcacttagttggggcccagcactgacctttcccctgagcccaggatgtggccagagccccctctgggacccctctcgccccttctctgcctcctcagcttgagctgcctgcccgaagttcggctgttccggggccagtgtgtcacctgccaacttccacatcaccctcctccctcgctccctcctctccttccccaaggacctccccccatttctggcagccaagccattaatctggagacagaaatgggtttgctatcgattctctggccactttttctttcattacaatttgtaccgtgattcttctcacccttctctgcgtccgtgcatttaaagagttgtctctttaaatgttgaagcttccggaagcctgatgctattctgtgtctcctttcaaaggaagaagggggggcccagctatgggtgaggactcaagttattagtttggaaatagagcaactatgtgtacagcccaccttagaggtcatgttacccccttcctgttaaattttacaattaattttggttcaggaaatgtaaataaatttgttaattacaaatagcaaaga

SEQ ID NO: 794 - DNA, 2592 bp, Homo sapiens
tttctgagaatgagcagaatgacagaagaaactgcctaagaaagagaaaagaaaataatctgacttgggaagtaaaaaaagaaaaatgcctgggaattttttttttaaatcaggaattaaggacagaaaaatctgaatttggaagtcaagagtgaggattctctagggagagaataaagatgctgggcctttcctttgggtttgagaggaaatagtgcttaaagactgaccttcctttctctggtcacgtggctggtgctagtataaatgcttactaccagccaggttcctcaccattttttcctgcatggcatggacagaagcaggggctaaagctctgttcctctctcctggaagcttgcagacctcccttcagaaccaatcccaagaagccacctatccggaacaacacaagacggagtttttgctcttaccgcccagggtggagtgcaatggcgcaatcttgactcactgcaacctctgcttcccggttcaagcgattctcctgcctcagcctaccaagtagctgggattacaggatgctgccggactggaagagctccttgatcctcatggcttacatcatcatcttcctcactggcctccctgccaacctcctggccctgcgggcctttgtggggcggatccgccagccccagcctgcacctgtgcacatcctcctgctgagcctgacgctggccgacctcctcctgctgctgctgctgcccttcaagatcatcgaggctgcgtcgaacttccgctggtacctgcccaaggtcgtctgcgccctcacgagttttggcttctacagcagcatctactgcagcacgtggctcctggcgggcatcagcatcgagcgctacctgggagtggctttccccgtgcagtacaagctctcccgccggcctctgtatggagtgattgcagctctggtggcctgggttatgtcctttggtcactgcaccatcgtgatcatcgttcaatacttgaacacgactgagcaggtcagaagtggcaatgaaattacctgctacgagaacttcaccgataaccagttggacgtggtgctgcccgtgcggctggagctgtgcctggtgctcttcttcatccccatggcagtcaccatcttctgctactggcgttttgtgtggatcatgctctcccagccccttgtgggggcccagaggcggcgccgagccgtggggctggctgtggtgacgctgctcaatttcctggtgtgcttcggaccttacaacgtgtcccacctggtggggtatcaccagagaaaaagcccctggtggcggtcaatagccgtggtgttcagttcactcaacgccagtctggaccccctgctcttctatttctcttcttcagtggtgcgcagggcatttgggagagggctgcaggtgctgcggaatcagggctcctccctgttgggacgcagaggcaaagacacagcagaggggacaaatgaggacaggggtgtgggtcaaggagaagggatgccaagttcggacttcactacagagtagcagtttccctggaccttcagaggtcgcctgggttacacaggagctgggaagcctgggagaggcggagcaggaaggctcccatccagattcagaaatccttagacccagcccaggactgcgactttgaaaaaaatgcctttcaccagcttggtatcccttcctgactgaattgtcctactcaaaggagcataagtcagagatgcacgaagaagtagttaggtatagaagcacctgccgggtgtggtggctcatgcctataatcccagaactttgggaggctgaggcaggtggatcacttgaggtcgggagattgagaacatcctggtcaacatgggaaaaccccgtctctactaaaaatacaaaaaaattagctgggcatggtggcacatgcctataatcccagctactctggaggctgaggcaggagaatccttgaacccgggagttggaggttgcagtgagctgagatcacgccactgcactccagcctagcgacagagcaagactccatttaaaaaaaaaaaaaaaaaaaaaaagaagcaccttcaggctggagaagcagcgtagctaacacaagtccagtccttgtgatgtggctggtagttggggatggccaggctgaagcagagagtcctagagaaatctcgatacaagcttcaaagcaacacctagacactgctctagcggttgatcctggagataaaccaacaagagagagatggaagagaaatactaaatgaggtcaaagaagactcagaaaggttctgagcctggagatgagcagggaggcctcagggcttagacctttaatgataggggtttccctgcattggtttgacctgttgcctttttgatgtgctctgtttgttttcatgtgttgtcttgtctcccctgctaaactgggagctgccaggggtctgggtcttatctccttcctccatggtaccccacacaggccaggatgtggtttggtacccagcaatcagagattggcactccctcatacaggggaaagcaacctggtctagcaaattgaaaataaagatgataaaactctgaa

SEQ ID NO: 795 - DNA, 1477 bp, Homo sapiens
atcacgaaggagagagaagtgcttccccaaagctgggatggttgggctacattgacatgacgttggatggtgttcacctgatgcccctcgtggggaatgagtgaatggtgcagtttgaagaacacattaagtcttgaaagttggaaagttcaccagtacccttctttccctcacccaagattagccctggtggcagccgaaattgcttttattatctctttgtggctgaggacctctaactgttgaagaaaacatattttacacgtcttgtctttctgcgaacaggaagcctatctcgcttatctttgcaaccccagacggggcttagtgtgacctacacacagcagtaatcgcacaacgtcccgtggagcactgcttctcaaatttggctgtacatacgaatcacctggggaattttaaattgtattgctgcctgaggaattttaaactgtactcccagagattctgatttaattgaaatgaggtgagtcctgggcactgggatgtttaaaaacgttccaggtgattttaacgcgaaacaaaaacagaaccgctgtttgggggcgttcttccttctccacgcctgatttgcgcacaggagtcggctgtctggaacgggggtgaggttcacaggtgtctgtcgccacgcctcttcctacagaaccaataaactgaagccgctcggtgacatcccaaaggacttgaattctgatcgggctgcagacgctctgcaccccgcccaagcttctatggtactttggtgtcctctctagcactggcaagtcgccttcctcttcgcccggcgccagccgctccctctctatgatcgccgagttcccggcgccgtctcgttggtatttaattccggaagcgagtttgaatcaaagaagaggcgggactttcctcccggaagtaacccacgtgcttccgctggagcctctcgggaggcgggtaacgttatagtatttgtcagaagttggggtctccgtgggcattgtgatccgtcccaggcagtgccccaggggtaggagagtgaacggcggcggtgggtgctgatggtgatgtctgctcccaggattaggaggccagaaggagatcccttccacggtgctaggctgagatggatcctctcagggcccaacagctggctgcggagctggaggtggagatgatggccgatatgtacaacagaatgaccagtgcctgccaccggaagtgtgtgcctcctcactacaaggaagcagagctctccaagggcgagtctgtgtgcctggaccgatgtgtctctaagtacctggacatccatgagcggatgggcaaaaagttgacagagttgtctatgcaggatgaagagctgatgaagagggtgcagcagagctctgggcctgcatgaggtccctgtcagtatacaccctggggtgtaccccaccccttcccactttaataaacgtgctccctgttgggtgtcatctgtgaa

SEQ ID NO: 796 - DNA, 6615 bp, Homo sapiens
tttagatttatcctaaacaaaatgagtacgacttttgaaaatcttttgtttttagtatttacctaagtattctcacattttattcattctaaattgaattcattttatacctagtgatttattatgttagtggctacaattttttaaaaactgtctgatagtgtcattaggaagtagacatctgaaaatctaatttgtatttttttgtagtagcacacgttatcatttgtaagctagaacatatttaactgtggttcctgttcttcatggttatatcagcgtgttttatagcacattttcatctgaatattacagtatagcatagaattatatgcataactagttgtagttgttgaattaaggaaaaagggttagttttttctaagaacttgaaaaaggttaagctaaactttgtaagcattgtagccatataatttgctttaaattaagagcctattgaagaaacattagttgaaggaagtactagtatatgtttaaaaatattacttgtgaatattaacttaggaaattggattttcaggttactgttgtgaaatttgagtcaactttaaattctttatcagagattaatattttttgtacaagttctcctacaactaaaaattctagagacatgaagtcagtttacttgaaaaatgaaatagtaacttttaaaacatttacaaaaactacaaatttgatatgtcatccaaaacaaatatttagaccagattatttgttgttgttaatgttaaaatgtgactgattctttgagtacaaaccatatatatgtttaatgtcattttgtctgactaacatttcaggtaactagaatatatctcactccattttaaaagtactgtttcatgttttagtgtctttttgttttctttgctcttttacaacttttagctaacagcatttcccctctattctctgttgcacagtgactgtttctggatcactgaatttagatacatgcctaggtgaaaactgctaatggcattttttaattattattttttccttctctacgtatttttattcggagggggaggggaaaataaatttgatttctgtgaagtctttttctcccctctggagatgagaaagttggtattatgctactttgctgcagaattggctaatgtcattttacagggaccttcacttctgtgatttctccttccctccccaccaggaaagtcacactgcctccaagacatctgatgctttgacactcttccttagcacaactctgctaaaccccaatcccttttgtaaaacctttatgttgatgatccacatggggcagcagggattacaggtgccatgaataaaaaataggggagggggaaagaaatttgaggacggttagaggggtggagttgagataaactgatcctaggtgagcagaggggaaagatatgtcagtgcttgtggatgtaattgggaaaaagggaaactataacaagagcatccctgttgggaagactaagaggcagaataaggggagggaaaacttttcagtgtcttaagctaattaaaaattgcctttctgttgggtatcagtgttgaagcattctgatcctccctagaatacctgtatctttcctaagttagtctttaattagattctgtaatttgaactaaaatacagtggagcctcctgtatctgtacccgtatgctgtttctaggtttattctctgttgatgcttaatagcatgatgaaaaactgagcagtttgtgctctgtgttttgtggggtgggggtttgttttgttttgtttttgatggaagtatttaagccaacttaaatatgactgaggattaagtctggcaggcaactctttgtattttgtattagacttcaaaatcttttcttcttcttcttcttttttttttaaatccaggagaatgctttattgcaacttttagctgactagatgcttaacttagtaacaagtttagcccttgtaactggctagctaaaagcaaatcggcttgtttctcagatctttgggggatagcaagaaacatttgagtgaatgttgttgaagattttcagtagtatagaaaatgatggcgctcttgtgatatttgtaagtagtaagtaaaatttactttttgtgtacaaatctttgaagtttttgttgtgttgagaactttttgattgtagcacgttaaggctgatagtattgtcttcgtttttttttttttcttacagcaagcaaggatttggcacagacatcctatttcatggctaccaacaggttgttatcctgaccctctttgttgcactgttgtagcacactatagcttcctttaatgcagggccccctcaatgtgtctcttacccttgttgcgacaggagactggaccatctactgtggtggtaccttcctgtttgctttgcggtgtattgtacaagggactttgggcacagaggggttaaatgcacaatgtgaagtgtagtggtgctttctgatgacatattctcgatttgtgagtgcataagtctaaaattggtagcctgaatagcagctaaagattacaaagagctaaacttaacgtagaaattcgagcaacttgtctgcatcttacaaccttctgtcttcagtacaaaccaacagtgatagcatgtgtatgcattcatttggcttgcaaatggtccaattgggagatccctgtatcaactgatggaaagcattggtgggaatatgtggatcctacagttactctagaattattagatgagctaacacatgagtttctacaaatattggagaaaacgcctaataggttgaagaagattcgaaactggagggctaatcaggcagctaggaaaccaaaagtagatggacaggtatcagagacaccacttcttggttcatctttggtccagaattccattttagtagatagtgtcactggtgtgcctacaaacccaagttttcagaaaccatctacatcagcattccctgcgccagtacctctaaattcaggaaatatttctgttcaagacagccatacatctgataatttgtcaatgctagcaacaggaatgccaagtacttcatacggtttatcatcacaccaggaatggcctcaacatcaagactcagcaaggacagaacagctatattcacagaaacaggagacatctttgtctggtagccagtacaacatcaacttccagcagggaccttctatatcactgcattcaggattacatcacagacctgacaaaatttcagatcattcttctgttaagcaagaatatactcataaagcagggagcagtaaacaccatgggccaatttccactactccaggaataattcctcagaaaatgtctttagataaatatagagaaaagcgtaaactagaaactcttgatctcgatgtaagggatcattatatagctgcccaggtagaacagcagcacaaacaagggcagtcacaggcagccagcagcagttctgttacttctcccattaaaatgaaaatacctatcgcaaatactgaaaaatacatggcagacaaaaaggaaaagagtgggtcactgaaattacggattccaataccacccactgataaaagcgccagtaaagaagaactgaaaatgaaaataaaagtttcttcttcagaaagacacagctcttctgatgaaggcagtgggaagagcaaacattcaagcccacatattagcagagaccataaggagaagcacaaggagcatccttcaagccgccaccacaccagcagccacaagcattcccactcgcatagtggcagcagcagcggtggcagtaaacacagtgccgacggaataccacccactgttctgaggagtcctgttggcctgagcagtgatggcatttcctctagctccagctcttcaaggaagaggctgcatgtcaatgatgcatctcacaaccaccactccaaaatgagcaaaagttccaaaagttcaggtagttcatctagttcttcctcctctgttaagcagtatatatcctctcacaactctgtttttaaccatcccttaccccctcctccccctgtcacataccaggtgggctacggacatctcagcaccctcgtgaaactggacaagaagccagtggagaccaacggtcctgatgccaatcacgagtacagtacaagcagccagcatatggactacaaagacacattcgacatgctggactcactgttaagtgcccaaggaatgaacatgtaataatttgtttaggtcaatttttcctttacttttttaatttaaaaattgttagaatggaaaaattccttctgatctagcagtggtaacccctgctgttgctgccactgcttcaatatttgtaagtgctgctttattcttcattctgaaaagaagagattatagtaaacaagtctttatctccacatatgatagtgttataaatactgtaaaagcatggaaggtgcaaaactcagtatttctacaattgcagctaagaacattaggatgaatggctggctgcttctaggaatataagatgcctcaagcattcattatttatgatttgaatactgtagctattttttgttgcttggcttttgaatgagtgtaaattgttttcttttgtgtatttatacttgtatgtatgatttgcatgtttcaatgataaagggataaaacagtatactgacaactgtttacaagaaagtggagaaaaatgtacatacatttttgtatgtttagatattaccgtaaatactcaggattggagctgcttgtaagtataacaatatacagaataactttattttatcttgtcagagtccatcactaatctaaaacaaaggtggcacttttttatgttaaccttaaactctaggccttactggaagccactgataggggacacttcactaccagatgtgtgcagtgcaacagatggtcatatacactgtgaggcactgaaattttgccttcagaggttctgaccagattggctgctgaaatagcccctaactttctgaaggcttgaagaggaaaaaataaagtttacatactcttgatgtgaagtgcatttaaatgtttgttggcttgttgcagttctatgaaacagagctgttaataatggttatgtggattactgtgatttgaaaactaaattcacaataacttacctagtagagatttagtgagttgtttcctttaaagaattttacactacatattttaatagtaaacagggatcacttttcctttagcattcagaatgacaccatattcttaaatatactccttccctgaagcgtgtttgtgtgtgatgccatatttctttttcaggtaaatgtagtcttccttataaaaatgaaattaaacctatgctctcaattcttttatattctaacaataaataaaaaagaaaagattactgactgtgcattgtacctgtatttatagtttatggttatcaggaagctctgtaagaaagaaaaggtcagcctcccaggcaaaccagtagtggaggttttacatttgtttgcacatctcagtatatttctgttgaggtaaagtttgcacagtcatctgacttctgatcaagcattagattttaacttgtttagattttgtcttaaacaccagtaatatggctcttgtttatcagctaatcttgaatttattctgtggtaaatcttttgagttgttgagtatatttgagattgattggattcgacctcttgttgaactgaaaacttaattttttctctgtatttttgttacaaagccactgatacgtgcacaattgtaattaagtatgttgcagttgtaaatattagagtttaatctcatgctctacctttatttagcaattacctaatttgccagtagctttataatttttaaagataattgttcattattttgtcaatgttatttgaacttggggtacttaggagcctctttgtagggactgtgcctaggtagcatgtcctaacatttgttctggtcttgcataacttcagtaatctttgtcattatatgtaactttgttgctctgtatggcataatattgtatccataaacatggtaattttgatacagttatacttttacagtggtacataatccaaggactagtatagaattaagctgagtgcaagatgagggagggaagggctttcttggtaatttagatgtgaaacctctacagagctatcatgtaaaaactacataaggtggttgtgctactgtataattgggggtgataataccaggaattttaataagattttgtaaagaatatccagaaaagtagtgaacttattttcagtagacatagaaaacaatgtgaatatttaaggtctgtgactatagttaaacttcactaagaatttgcagaattgttttgagatgtgtgaataaaggtaattttattgaatcttcattggtgctaatgatggacagttaaaaagatagctagtgtatattgttatgggtcagtacttattagtacttccaaaattgaatttgaaatgctatgtattcacttttcactctgtaaatgtaattctttacaatgactttatttattaaagggcagccagttgtcattttta

SEQ ID NO: 797 - DNA, 3648 bp, Homo sapiens
acaaagcagtggaaatcgagcaggagcgggtgaagtcagcgggggcctggatcatccacccctacagcgacttccggttttactgggacctgatcatgctgctgctgatggtggggaacctcatcgtcctgcctgtgggcatcaccttcttcaaggaggagaactccccgccttggatcgtcttcaacgtattgtctgatactttcttcctactggatctggtgctcaacttccgaacgggcatcgtggtggaggagggtgctgagatcctgctggcaccgcgggccatccgcacgcgctacctgcgcacctggttcctggttgacctcatctcttctatccctgtggattacatcttcctagtggtggagctggagccacggttggacgctgaggtctacaaaacggcacgggccctacgcatcgttcgcttcaccaagatcctaagcctgctgaggctgctccgcctctcccgcctcatccgctacatacaccagtgggaggagcagctcctcctcggactcctcagatctttcacatgacctatgacctggccagtgctgtggttcgcatcttcaacctcattgggatgatgctgctgctatgtcactgggatggctgtctgcagttcctggtgcccatgctgcaggacttccctcccgactgctgggtctccatcaaccacatggtggtgagaagtccccacagctctgcctttcctgggccttcttagggctcttctgcctgagtagcagggatggccacagggagcaggaggtgggagatgatcacaacagaaaataggagcgaggaggtggggaggagggaggaaaggggaaggagacccagaagaagtgctcgtgtgttggagggagcaggcaaaggaagggtacctacccggaagctgaggcccccaagttgcaatagaggacccttttgcctcagggccccccagaaccaaacttaagtgcctgccaggaggaaggcctgcagtagaaggggcagacagaaagaccaaagaaggaaaaggggcaggcagagaatgaggctccgaggggcccatgcccagctctgcaatatactctgcccctcagaaccactcgtggggccgccagtattcccatgccctgttcaaggccatgagccacatgctgtgcattggctatgggcagcaggcacctgtaggcatgcccgacgtctggctcaccatgctcagcatgatcgtaggtgccacatgctacgccatgttcatcggccatgccacggcactcatccagtccctggactcttcccggcgtcagtaccaggagaaggtcagcagggacaggagagggaggtgtggcatggaggggtgttggagactgggtagcctgacttgaggcccattctgatgtgtgcccctgttgcgtctctgtttcctttcctgccctgtgtccatttgttccctgcccctgcatgtaccttttccttgtttgaacctatgcctgtgcttggcccctctgctgtccacgcctgggttttcctatgactgtgctctgtgtcttcccggtatccatcattatccgtattcctctgtggccctgtgtatccatgtctggttccacgtttcacccctttgagtttgacctgtgtctctgaccttccgcacacacaccccactgtgccggccccaaatctctccctctgtcctcttgcccctggcaatgggctggccctccagtacaagcaggtggagcagtacatgtccttccacaagctgccagcagacacgcggcagcgcatccacgagtactatgagcaccgctaccagggcaagatgttcgatgaggaaagcatcctgggcgagctgagcgagccgcttcgcgaggagatcattaacttcacctgtcggggcctggtggcccacatgccgctgtttgcccatgccgaccccagcttcgtcactgcagttctcaccaagctgcgctttgaggtcttccagccgggggatctcgtggtgcgtgagggctccgtggggaggaagatgtacttcatccagcatgggctgctcagtgtgctggcccgcggcgcccgggacacacgcctcaccgatggatcctactttggggagatctgcctgctaactaggggccggcgcacagccagtgttcgggctgacacctactgccgcctttactcactcagcgtggaccatttcaatgctgtgcttgaggagttccccatgatgcgccgggcctttgagactgtggccatggatcggctgctccgcatcggcaagaagaattccatactgcagcggaagcgctccgagccaagtccaggcagcagtggtggcatcatggagcagcacttggtgcaacatgacagagacatggctcggggtgttcggggtcgggccccgagcacaggagctcagcttagtggaaagccagtactgtgggagccactggtacatgcgccccttcaggcagctgctgtgacctccaatgtggccattgccctgactcatcagcggggccctctgcccctctcccctgactctccagccaccctccttgctcgctctgcttggcgctcagcaggctctccagcttccccgctggtgcccgtccgagctggcccatgggcatccacctcccgcctgcccgccccacctgcccgaaccctgcacgccagcctatcccgggcagggcgctcccaggtctccctgctgggtccccctccaggaggaggtggacggcggctaggacctcggggccgcccactctcagcctcccaaccctctctgcctcagcgggcaacaggcgatggctctcctgggcgtaagggatcaggaagtgagcggctgcctccctcagggctcctggccaaacctccaaggacagcccagccccccaggccaccagtgcctgagccagccacaccccggggtctccagctttctgccaacatgtaaaacctttgagtacatccagccttagttcttggggtgcagtagtatgtacccaagggcagatgcctcttggggaaggccatggggacctgaaacattgccccatggaaatgtcgaccctgtgcggacattccgcatactgccatgaagacggtctctgtgtcctcagctcaagaatcctgtagcttgtcccatcataatccattcacccgttcatcatgtgtactgagcagctaccatgttcaaggttctgcccggtctggttatcttcctgttcctgtagcatagccaggcactgccagtcacctgtgcccccattgctgtcagcagatgtcttgggtcctgagtgtaaggagacaggaggagtaggaggaggcagggcctctccatgccagcctctgtggtccttgcccaaacccatcagcgcaatacttgaaccttctcccaggtaggggcaggaggagccacatgagagagggagaaggaccgcgtttacctttagagttttgttttgttttttccttctgagtttgctgttggtgcaggaataagggaaaggcccaaggtatccaagcctggggaagggcaggccagccagcacctctgccttctcagggacaagagtagtcctttaccaccctcactctgcctgtcccctctcctactctacagcattaaagactgtgggaccagga

SEQ ID NO: 798 - DNA, 2205 bp, Homo sapiens
ttgtagtgagccgagattgagccactgcactccagcctgggtgacaaagtgagactccatctcaaaagaaaaaagctccataggagaaggaaccttgtctcttcaccacataaactgtgtttggattcgcaatcgagttgggaaaaaaaaatcagtctggaagagccacaccaaaccgctaacagctactgtctctgggaatagaacaaggagtttggttggcgcgatataccgcccctgaacctctagccacaataaggcttaattaatgaccggacgacttgaaagcgccttccactgtttatctcttaaatctgcaacgaaatgcaacaaaaacgcaagaaataaacaatagaagccagtcttactgcacactgcagaagccaataaaccccaaatgtagctcaaaacaaggtgtcacgcaaacttctgatttttttttgttttacactgaatctctgtcactctgactagagggcagtggcgcgatctcggatcactacaacctccgtcttctagagtcaagagactctcccgccccaggagtctctgccactctgactagagggcagtggcgcgatctcggatcactacaacctccgtcttctagagtcaagagactctcccgccccagcttctccaataggtgggattgcaaacaggcaccaccacgcccgaataagtttgtgaacatttggtacaaataacaaatgaccaagttccttggttgtagttgcctaacttttaatacttaaaaatgtagcctcaggaaataagaggcctcaaaaaattgaataaaaactcacaactttctctccacggaaatctttagtaaaaggcgaaagatttatgcgctttgaagagaaacccgagtatattcgtgacttccgcttcgaacctcgcagggagaactaacacttaacacacttatggttgttggatgcctgcgtggtacgcactccctatatgtagtttatgcacacagatgcgtgtaagaggcatcatgctctaaaacagtgcagaaatgcgcgcacagagggagtgcaagcatcttgagggtatcttttcgtggtgcaccatgggtatgcaaatcacaggcggctccgggctgttccgcgccaccggggaagccatgggtcactgatctcctttgctctcctatgctcctctctgctggtcctcctgggacccgcaccccgtgggcggcgccgggtgcggagtcctttgcggagctggtgttcgtcccaggggttaaggtcctgtcccgccgtccttacccgcagtaagcctccgggcttagagagagggacggggaaacagacgggcacagacactcaggggcactgggacctcacaggaggcacgaccccacccctcctggaggagatggcatccgatccaattcacctcgaagggtgatatggggtcacatcaaggggagggctgtggccactcttcaaggcctctgcttagtggagctgttcaactttcacagaacaaacaacttacgctgtgtcctcactaactgctagcacctcagtttctgagcagttcccgcaactgatccactggctgactggccaaagacacctctcggctgtcaggacaaccaacttacagaggcctttgccttggaggttgctctggaacctggctcctttccctgggtccacaaacctcctgagaagctccccagaccctgttgacctctctctgcttcaactggctgctttcctgatctgcctccacctcgccttccacctgctgcatggctttgcccctctgccttgccgtttcccgtgcgggtgaagcaggtaggtggaggtgagtctggagagacgggcaggctggaatatggtggctctgaaagccacacagtggggttcttttttttctgctctcggtctccagattgaacccagtaggatttcacaccaacaaaatttgttatcgttttgtatagtaagcacttaatccagatgatgttaccaagtatatgacaaaaatccagaatctggggtcttttccacccagaactagagaagctaatacctcaggtcctggcaccagagaagctccttccaatagctaatgttcacttgcaaactccccactctgtccaaaaaaaagcactgaagtcatctgagattagttcacatagaatatatttcattctttaaaaaataaaactttcatcatagctaa

SEQ ID NO: 799 - DNA, 10861 bp, Homo sapiens
gaaaaatgcttcctgtttctttaaaggcgctcgcggctcgggcggcccgggctggggaggcggtggcggcgggagctgcctcctctccgggcggcggcgctgactgatctcgcgaactgggcttctgtgtaaactgaggctaaacaaacacagatggagcgcagcgggcgttctccagaaatgctggcaaggaggcagcgacttcagatgacactctgagcgctccgggaacggacagcccggcggcttcccgaagccggcggcgcagctgcccggggcgagggggagaaagggagagagggagggggagggcgggcgaagcgggagagccagagactcctcggcgctgagcgcggcggcggcccgggcagccccacgcccctgcctcgcgcgccgcccgcgccatgaagcacatcccggtcctcgaggacgggccgtggaagaccgtgtgcgtgaaggagctgaacggccttaagaagctcaagcggaaaggcaaggagccggcgcggcgcgcgaacggctataaaactttccgactggacttggaagcgcccgagccccgcgccgtagccaccaacgggctgcgggacaggacccatcggctgcagccggtcccggtaccggtgccggtgccagtcccagtggcgccggccgttcccccaagagggggcacggacacagccggggagcgcgggggctctcgggcgcccgaggtctccgacgcgcggaaacgctgcttcgccctaggcgcagtggggccaggactccccacgccgccgccgccgccgcctcctgcgccccagagccaggcacctgggggcccagaggcacagcctttccgggagccgggtctgcgtcctcgcatcttgctgtgcgcaccgcccgcgcgccccgcgccgtcagcacccccagcaccgccagcgcccccggagtccactgtgcgccctgcgcccccgacgcgccccggggaaagttcctactcgtcaatttcacacgtaatttacaataaccaccaggattcctccgcgtcgcctaggaaacgaccgggcgaagcgactgccgcctcctccgagatcaaagccctgcagcagacccggaggctcctggcgaacgccagggagcggacgcgggtgcacaccatcagcgcagccttcgaggcgctcaggaagcaggtgccgtgctactcatatgggcagaagctgtccaaactggccatcctgaggatcgcctgtaactacatcctgtccctggcgcggctggctgaccttgactacagtgccgaccacagcaacctcagcttctccgagtgtgtgcagcgctgcacccgcaccctgcaggccgagggacgtgccaagaagcgcaagttgtgacttttcttcctcctctgcgagcccgaaggccacctcattagtgctcctgacactgcggaacttttctttctcaaggctgttgtcactggggatggttgaaagtgactattttcctaagaaaacagctggaggggacatgggagcaagaaggtgcttgggagcgcatctcagtgttgaggctcaaaacaggcagcgccatggcagagtcattccgccgtcaccctgaataaaccccatgcacacagacgagaacaatgtctcctcagagggagggtctgggagaccggacaccatgcagagacccccatcagctcatcagagagcttcacggagatgttctgggaggacaatcacattcataaatacgccggtgcctcggctctgccgctgactgcagcatgacatgaagccttttttaagaactggctgctgccgccaaagccttctgggatatgtctgcctggaacctgggcacctcctgggagcagtcactgggtggcctgtcaggggctgtggggtcctggggcagggccggcaactggaagccagccctggggaggaaaggagagaagggcaaggctgggctgctttcctcacagcccctggacactgagggaggagctgagttgggcctggggctgccatgtgtcagacagtggtgatgtgatggggggacacaggtcagtggcagggtactgggagtttcccctttcctttctcagttctttgcacccattttccatgggctgcctccccagatccagaagccccagcagcccctcaccccagcagtggaaaaagcccgtcattgacacggctgtgggtggccggctttgcaaaagcctcacatttggggctttggagggctttttgcatttcatctttacacaggctcctgcacctcattcctcttgccctcctctcagctttcctcccacttccagttagagagatggcagctctggcaggaccaaatattgatgtttatcacagttttagggccatttgtctcaccatctgaagggctcagcgcaggcccacgggatcctctctccttgagtgacctctgggggcaggtatctggtttggatgctggagctggtccctactcttcccttgggggccgtgcggccgggtgctcaagtgttttaacctcaggaccctgattagttatcatgaagctaccccaccagctcctgggtctgttcatggattagtggcataaaggacgtaatattgttttgcaaaatctgctctccctcccatgtctcctgcccaagaagttggtcttcgtggggccaaaggcaaggaggacccgaggaaggaagaggaaccactgtccccagcccctggtatggcatggcgtcagcctagtgaccagaaattgcttttgaactctgaggcttccagaggacaagaggaagaggaggacagggctgccctgcccactgctcagccttgagccctgcacctggcacagtgcgaggcctcagacagggtgtcagcaggccctggctccccacatcccatccttaaacaggccatgccctttctacctgccccagcagaccagaaagcagtttccatgggaaacaacaaaccttccttgtgctcccaggataagtgtttctagagggtgaagtcgggagccattctctcctttaacatcttgccacctctgcccagaattcacagccaccggcgcctgtcttagctgccctggctgtcagccccaccagagcccctcctggctgctctgctgaaagctggtcagactgcctcactccatcccctacttagctcccctaaggcctagggggctccctacaggccaagggatgaggccagactcaatagaacacctgataggccccccaagtgacctggccctggccggtcactccctatgtcccaatttacaccccagcagcacagaactccttgctcaaaggggctatttttggcctctgtgctcatgccatcccttctgcctggaatgcccttctccactgtctgcctggctaactcctgctcattctggaaggctcagctcctcctgaaagccctccctgaccccaaccccagctccttcctcagggtgtcgtagcacagggatgcttttggtctaattcaggagagcatcatgtgatatgcttttaaagtaatgagttaaaatgttagacaatatgaaactctattatgtgatatattagatttcatgtcattacattgtattatattatatttttaggtggtatgctatgtgacataggatgcgatgtgatattacatcccatgacactatgttacacagtgttggattaaatgcctgtgtctctggctagactgtgagcccctttctctttgtgtcctgtcttctggcacatactagggcccccaaataatgacacaccattctttccactaaaatccacactgctagggctgaatgtccctatgctgatggcaagggacattcccttctagggaaggattaactaggggctttaggacacagctagggagatgcccctgggctctcctgtgctccagttgggctcatacccttgttcccttgaatctgcaaggaaagcactgtgtttcaaataacagaaacccctcaagcagcagcttaaactaacaggggctggcatttttcatagttcagaaatcagctgctccctgggatccaagagtccaggcttcttttgatctttgcctcatggctgcagagtggttgccacagcaccgagcttttcatcctcaagctgcatctacagtcagggtagggggccatgctaggaagagtgtttctcctcaccagggcagtcagtcttgcccagacagcccctcccttcctccaaaggaagatgctcccctcgaacccgagaaaaacatcaaggtctgtcagctgggagggcaacagagaaaacagccatgtggctcgtgtctggagggttgaccctgatttgtgacaaggtggttttcttcctggggagctaactgttgtcattaccttaaccacaatgtcagagccccacttctttgagcttgcccagtcctcaccacagccccacaaattgggtgtcaccagccccattttcaggtgacagtgctgaggttcacagaactgaaatgacctgactaggcccccagcgacctcgttcctgtgcactgcactttccggtttgcagagccctctcacacccatgattttcttgaatcctagaacaagctcctggggtccacattattaaacatgggagtgagatgaggcgaagtcgcccaggctcaagcagctgggcagggctgggtggggcttggacaggctgaatccaggccaccgctgtcctctgtcctctgttctctcaaaggtgagggtgtgagcttcaggggttgcctggcggcttggggcctgaggcttggaggcatggtctgagtctcagctcaaccactcaggagctccgtaacctcaggcacttgccttcaacaagcttcactttcctcataaaatatggataaaagcaggtgaggagcgtttgaggaaatgagggctgtgaaagcattttgtcaactggaggcacagcactcagagagggtcactggaggccactgctggcccatcaggaaggtgggcagagggacttcagtgtcccctcctcacgcagtgacttagagaatgtgcatgcatgcacacacgcaggtgtgctggcgcgtccgtaggcaccgtctgctggggtccggtggagggcctcctgcatggtgggccgatttcccatgcacatgggaaggaggtactccctggaaggcggctgattgacttcaaggatttcaaaattgctctacctgcacagggcccaggagccattaaagatggaccctcagtggcagggcagggcagggcagagccaggcagctgggcacatgttgggcagctctgggagtgagccgtttggagcccacctggaatctggagagccgtgaccgggcattgctgagagctgtccatccccctgtcagcagctgtgcctcccgcctcgctttcctgccagccctgttcctgccaccaccacgtacacacgagtccctgccaccacagcccacccaccccctccacacgcacacacaggggttcttcacttgttcagtctttttaggtacctgagtgttaaaagatgagtaaaacatgaagggccctgccctgcacatctacttaagaataaatcgccctgagtgtttactctgtgtcaggtactgttctagtgctgggggcattttggagaataaaacagaggccccacccttcggaactcagagctaaactatagaaaggctatgcataaaaaattcagaggagggcccctcggtatggtctttggagcccactgcacttagcctgcatacagttcttacgagcttgactctcaggcccctcagatctgaacctcagaacaaaaacagcctatgagggcaggggttggggtatcaggccatggagcaggtacagagatagcacccagaatcagccagtggcctcatcgaataagaagaaatagacgcatgataaagaacaaggccagaggctcagaaggaccgagaggctgggggcccccttagtgtcagggcagagagccggcaagcctcagggaccttggaattgtgtgtgcactgatgttcgtggacttgaccttgagttgtcaagaggaagctaaagtacatccagtaatgtcgggctgagaatgcagggaagtgcatcagttattgggaaagggcccatccaagctgttttggcacagaaaacatgtggcttcctttctccagggaagtctgcttctgtgcaggagcctgttctcctaggatggcggagctgggagggctgggcttctcgtctgttttgttcactttgggatccccagagcctccagtggagcctggcgtggtctaaacgcttagtaaacatttgctggatgaatggagcagtggaagcatgaggagtgactggctgcaggcaagaccaaggccaccactgtgggccctccttccagtcaggcctgaggacaaggtgagctcgctgagtccagcctcgtggtcttctccaagatgccgccagatgcccagcctacagcctctcagggtcggatcggagcacgcctgcctccctctcccctccgccctcacccagccaatccgaggctgcttcgcactttgccctctgcctggtggggaggggagagctcagcccccgactcactcagaccccaaggcccactgtccagctgcagaaattcgttgccaaagattggacagagacaccgaaggaaatggggtggtgaaaccccacagcgaaaagccacaccgttgctctgtgacttttgctcctcctgttgcctgagccccatctcaagccaaagatgagtcagtggttctgctaggaactcatggaatggatgggcatttgatgacccctgggggtcatcttggccctctgacctggtgctctctctccactgggccttgtgctggctgagtgcaagacaagccttaggggctgtgagagggaggctggggtgcctgggcggggctgggagtgggacctgagatccctgcccactctctccccttcattggctgcccaggccactggccccagttctcagtgtcccttgggtccaggctccttgggccctaagcatcaccagaagggagtaagcagggagagaagcaatattactccctcccctacaccagggacttgccccagggcagctacctatgggtctttgcttccccagccagcctctcctcactgtgacccacccccatgggcccccgtcccaggcagccagcaccatgggcaggccctgccatggacagaaaaagagtttttctcttgttcagcctgcacgtggcctgaggaaggagtagaggctgggttggctggagccgtcctactgggcaagatggcgccccacttggagggcggtggtctgttacagggtgtgcaggggcagagaaggaagggaccaggggactgggccagtatgtggaggatggggcctgcgtgttcaaagccaaggcccgccccttccttgtgctcaaatggccaaagctgttcacgtctgtgctcaaccatctgcttcaaattgaagtaaaagccccaaaatgtcaagaaaatacttgtgttgagtggactctgtgggtgaccaggactttggccggtcatcagctggggagtgtgagggagggggttggtttctacctacaggttgagagcccttcaggatcaggcgctgtccgagtgagagtgtgtgtgtctgtgtgtggaagggggtggagggcggttcccacagtagtctcagcctggactagtgaccaggaggcctggtcaggaacacatgaggagccctctctgtccgcactgcactcaatctgtaccatggatttatgagataggggcccctattattaaccccgtttcacagatggggtaactgaggcctcaagtagacagggtcagtcggtgacagagccagtcatcgaatcaggatgggctcacttcaaatcctgtgctctcaaaccttttccagccccatcaccagtcccagcccaaagtctcttgtgtggccttgtcacattgcttcacctcagcgggcctaaggtagggacaataaaggcccattgggactgggggaaggggtgataagataaaaaataggagagcactgtcaaggcagaagggacagggctggccaaggaaagggggataggaggggaccggaggctgcagccatacaggacacagtttgtcccttggtttcaccagtgtcactttctcgtctctgctgctcagactcctgggctgggctggggctggctgcagggagccccccttgcagtagcgtttctcaggctggccctttaccaaggaccacagtgtccatgctgtcttggatccctaggctggcacagaaacaggggacccaggtggccctgagcactcctcagagcaaaggtgctctggaagcagactggacagagtgggcatggaatggggccaggagggtctgttaggaaggttcagccaccctgtgaagctggcacagataacagcactgctctgttgtccctcggagcctctgagtaaccctgatggcacttcctaaggcagcaggacatgtggactgaccagcatcaaactgttgacatagaagaccatttctattaccaaagggagtgtaccccattctgctgccaagggagcaaacccatggccttaccacccagaaagagcccatcctccacctcccatccccctcctgcatacatacttcattacatgtttccctttcattctgaagcatcattgatgaccagctgcctgtcagacactaagataggcagtgggaatgaagagatggatcttgtgtcatgcatggcatcacggagctctgggttctgtacggagggtgggacagacaggtagacaagcaaataattatgattatagcagatgactaaggtgttgtcgggagcttcaggaaaggaagaactaactcttggggaggttctcaggaaggatttccctggaaagtagccatgggacttgcgtcttaaatggtgagtaaaagctttctgagcaggggagtaggaaaagggctttctatgcagaggagcactcagcgctggcaggaaattggaatcacccaaggagattattaaatattaaatattgatatgaagtattgatgcccaatttcatctccagaaattctgatgtattggtctagggtgttgcctggtcattgggatttttacaagctcctcaagtgatcttaatgtgcaggcaaggttgaagccgctggtctaagtggggtctggtctacgataagaaagtgactttgagccatcgatttgggagacaggctctgggtggatgtgtgtgtgtgcacacatatgtatgtatgtggatgactaaaagtgcatgctctcctctcctttcccagcttcctctccagcacagcaacttgtgttcgtatgcacacacatgcatactctctctcatgggcacatgcatacccacacacacactcgtgtacatttccagaaaatggaattacatttcagatagattcagattccaacggcagtcttctaaacacttttatgcaagcagccattcaaggagaccctcagcaaaatataaatgacgaggagctgccctcatggggccctgtgaaagcactttgcagtccagccttgggtttgtggtcacagagtcacctgtggatgtttgtagcacactctccttgtcttgtctgctctgggtcaccaggcacaggccataaagggatgagggggccctctccagggacccgcaagatcttcctgggtatgtctgcatgaagccccacgtgtgcacacccatcttcatgtgtgtgtgtgccagcctcctgctctctgcagaacaaaaccagaaggaatggctctgggagttggagatctcagctcacaggccaagctttgcaagactctccaaagactgcccacagactgtgctgcttcctgggtctggcctgagactatcccagaagagagggttaaattctggaggtgaggttttgagcaagtgttcatccccccacactatgctccttcctgtctccatggccacatccttcaaggctctgtgctgttctctttttttctggatttctccacctccaccaagttcccctttctcacagctagtggaggcatgagtaggcaggtcccaggggctgggaactgggtagcattgccatgtgcagggactgtgttgggagctgcaggtacagagctcctctgtgctcaagagcttgccggtgagcctggacggaggcataggtgcagctaattaggataagacaggggccgcgctgtggtcagccgtgggaagccggcgaggggactggagttggggctacacttgcctccctcctatgctgcttcctgagccacgaagtggtcattgccagcatcccaggcaacaaacagcaagactcagacatctccaaggaaaccctttgagtggatctgtaccgttgttctcgtcttgctctcttgctgccctgccaccttcacagctgctttctgtttcctggttccaggaagacagcggggcacagggtccctgctttgtgaggagcagctggcttctccctttgcccccaggttttgccctcccacatgtctcccttctggtgacccggaccccagacaaactatgcctgcctccctgaagccaggcatcctgaggaacttgatagacaaacaatgacagtgttttccagaactgtgggtacgtgtctaatctcagatggtactatgaattcctggagatcaaagtttggatctaattcaacccctgatcctcgaaacggctttcttgcaaagtgtatatattggtttctttgctgaatgaatgaataaaacatggaaaatgtggtaattca

SEQ ID NO: 800 - DNA, 1624 bp, Homo sapiens
atggggcctagaaccaagaagaaccaggagaacttagtcagaggaacaactgcttttctttccttatctgtcactcatagtagtggtagagataatctagttttttccctgccatcaaggaggcctaagaaatcaagataggtagaaactatttaacttttaacattaaggcaatggactgaattttatcccccatgaaattccatgttgaggccctaataccagtgcgactgtattcggagatagggcttttaggaagtaaataaagttaaatggatcataagggtgaggtcctgatcaaataggattggcagccttataaaaagaggaagagattctctccattcctccctcccaccttttttcaacattcatgtgcggggcaaagaccatgtgaggaaacagagaaggtggctgtctgcaagccaggaagagagccctcaccagaaactgaatctgctgacaccttgatcttggacttccccagctccagaacttgagaaataagttcctgttgtttaagccatccaatctgtagtattttgttatggcagcccaagggtacctatgatggcgggcctgcatgagatgctggaagacgtgtagaactgagtgaaattttctttgtcctcagagaggtgatggctctattaaagtgtccagagagaactcatctcacaccaagggcataggagcagccacacttaagatcaactgtccttaaccacagcatcatgatacgctggattacccaatcgcttgtaaggaaagacagagatgaagttatcctgactgctgagatgagcagtttaccctaggaggacctgtgggactatgttttggtaaagaaaagttgagctgctctgtgggagtgaggttccaatgaagccaaatgtacaagagtactgagtatctctacagtcatctgatgagctaaagaagaggccacatccgccatcataggaaataaatctcctgacatctagcttataattacgggaaactcaaggagaactttctgaagattgaaatctgtaagaaagtagatttccagaaaagaagttccctcctgtgaacagaaaaaaggacgtatgggaaaacaccaggctacatctttatacatgtgctgttgacgaaaaacaaatgccgcgttttctcaggaaggagtcagctggactcttggcagcacctcttgaccgaagttttggtggaaagtggagaccaggtgctaacaactattgattgataactgacgttgagaggatcttagcaggcaggaggaggcaaggcctcaggtacaagaggactatagaaagagaatgtgcctgccaaaaagccaggtcttccctactggggcaggataaagtcaaacacaataggagttccctggctgccatcttattcatctcaggagttcatcagaaaaagaatccagaatctaacaacccaaaggaggcttaatttttgtacttagtacaaagctacaaaaattaaggtgaataatggcacctttgtttttgttttatgctatcgtacgcaactcaagaataatgacataatgacatcttttttttttttttttttgagatggggtctcgctctattgcccaggctggagtgcagt

SEQ ID NO: 801 - DNA, 4148 bp, Homo sapiens
tattatctcattatatattacaatgtagtaataatagaaataaagtgcacaataagtgtaatgtgcttgaatcacccctaaactatctccctaccccttgtctgtggaaagattgtcttccatgaaactggtccctggtgccaaaacggttgggaaccgctgctttatagcactcaagataagcaaagtgcctgcagccaaggatgtgagtcaccagaactaggtggaagaaccactctgagaaagaaactgctagcacaggaaagcaaaaacgacttcctcttgcaatcgtgtcttaagaatttctgttagaattttcttttccatttctttctcttttttattttctttataaacttttaaagccagtttcacaacttgcatataaagaatgtcagctgctttattagtggtgttccacttggcacttatagggaagccgggcagtcccggttcttaggataaacacactttatagtggattttctttatccagcccagcaggctggctctttccttgggaataatattgggcatgtgattgttccatcttcagatcctgtatcaacccgcacatgctcttccagcttgcagctttcaaaaccaaagacatggctcccaaactagctactttccaaatctattttaatgaaggtgcttcagggagctgatgataccaatccacaaaacaatttcacagggagaactgggcccattgtctcagctctgtgtcttagtagctttgcaaaagatcatttcccagagcctgagtttccaatgacataaatgcaaacaatttgtaaaatctaactcattacactgatgtggatgattataatatgcatattgatgtctagattgctgacttttgagagtataataaagcaaatgttacaaagaaggtgaaaatgcaaatatatattaagaatctgctttaagctaggcatgtgctggctttatatatggttctatttatttgatttttaatacaattttataagaagagagtattagttatatttgataggtaaaataatgaggactcagttattcagagtcacacaggcagcaaacagagggattgggattctacttataaacgatttgactttataccagtgctctttcaactggactaggtggctgctgccacacaataaatcacaccatcagagaatcttctaggtaactgtttcactaaaatgcaatttctctgaacaaagaacgacaatttttggccaggagagacattctgagactatacaaaagtatacaaggatcacttaccttcttaaaaaatattgttctgcctgtgatccttttagaaaatagaaaacaacaatagaaaactccagtggagatttaagaatttagttcagaacattacattcctttagattatagtttagcaaaaattggtggattattcatttatgaaaaagattaaatctctgacaacgtacataataaaaactaccatacatattgatatttaatttaataaatatcaatacatattaatatttaattgatttattgaaaagaatagagagattgggcaaggttgctaagggtcaggttcactctgacaaaggtctggtctctctgatttccaccattgcttaacttattccaaaatatgtagcctcattttaaggtaaataactatgagacgagagacaagtgtgaaaacattgtgttttctttccaggacgctgaattgaactgatgtcattgtaaaaagggaaatgagttctctggctaggtttggggaacaaacctcagactatcaagagttcttgaattttgtgaccagtgtcctgagcaattggcttcatctaggcctcagatcacaaaacagagttgtataaaatggaaagtgcaatgcttttttagtaaaataacttttctcttccttcctttcttgcttttttccttccttccttcctccctccctccctctcttccttccttccttccttctttccttcccccactttttttttggcagggggatagaatgtaagactatatatatcagataattctctgggctacattttaaaattttcatctgataatttacttttgtttctgtgtggtaggagtgagagctctcaattatttagcactaattgtgtgccaggttccatctgaaggcttgacaagagtcaccttaattctttgccatattttgaggtagatactactggcaccattttttagactgagaaaggagatgtagaaaggataagatgttgtccaaatccacattgacagtaagttttggacatgagtctttaatctagcaatatccgactttagagtgtgttcttaagcactactctataagttttaagcagctcctttatgatgtcattgaaccgggttttccagtcacattatacatgtggagattaagacccataataacaatgacaacactttcataacagttcatctgtgttaacatacaaattctcgcagcaacactccaggtctcactccattgctcaggctggaacttttatgatttttttaagctcataagggagtaattcttaattgttaggtggagctcaagaagggtcagtgaagacccgcaaagtggtcaaaatgccaggctgagctgctcttcagtttggatgcctgcaacaaaaatgaaacaaaacaagaaaacaagcaaaaaaaaatcactttttgttctgtaaaactttacatttggaaacttaccaactggtaacatgagaggattaaatgaagataacgatcaagtaaaataactggcatagcacctggttctaataggcttctataaatgctgcttcccaccactcctctctcttccacctgtttcaccttttgagaaccctgaatcatgacttccagctacattatgcctgggcatcatgactattcagctccctgaagggaatgccttctgatgattgacacttagtatctctttcttactcctctgcctatccccttgtcttattcccttactactctcaaccaggaagctggagtagctgaaagtagatttcttccaacacgaaaatgcctaggtcattaggtacataagaggtgctaactaactgataaataaataaggagagagacagagagagaaaggaaggaaggaaggacaaaacctaagatagtataagccactgctaacctgtgatgttagatctaagacgtcaaagaggaactggagtgctggtgattccaccactgtgatgccttgctgtggtcacagtgcaagcgctgggtatatatgtcattctaaactggagatataggacctatttcatgtgagaacaagcctgtttgatatcagacatcacctggtcaagccctagcattgaccattattccaaagaaataaaaaaactcctctgtgagatcaggctcaaaggacaggacttgagtttaaaataaatttctgaaaagactcaaaatcaaagagcatgaagttgtggctaacctgcagagaatgcctatggatttgctttttagttctcagaaaatgagatgagcggggcatcagctgaagttgagaaggactaaatgtagagacacctaaggagattactactttttatagtgattaatgctcttaatgaagtcattcttccaacttaccactttgtaagaggtttatatacattcacagctgcccctcttccttcagcaaaccaatggtatgggagatatagcacttgacttggaatcaggcagtctgatttagaatctggcttttcactatcagctgtattagcatggtaagtcacttaaatgttctaatccttgttgtccactccactccccactgcaaaatgaggatatagtagattctgctggtgcccatccagccccattccctttcccagaccagtgcacccactctccagctaccagaagtgctggctgataatggctgacagttgccactttgccaggagaaatgtccttgtctggagaaatgtccttgcacctcacctccttcccctcatagctcactggcaatgagtagccaacatcagtaatggggagtaataatgaatgtctatttcacagagttgttaggatgaaataatttagcatacatgaaaatgcctatgatgctaaagtaaatgctgaaa

SEQ ID NO: 802 - DNA, 3956 bp, Homo sapiens
tttaccttgtgaggaaaaagtgggttttaaaaaattaattttatcacattaatcagatgtaactttagttaaaactgaagccaaaattccagcatttgtcaaaattctatatagaaggcagtcccagctgtctgaataggattatgtacacataagctgtatgaaatgagctcatgcctcatgatgtcaagttctgttttttgtctgcagttcttttgtttattctcagttgccagactttaaaagacttcactgtttaccattttataattaaggtttaattgtgtctatttaatgtgttattctgttctgttctcacagatgcaaacttcgttttttaaaaacatgatatctaaaaagcagaatgtgcagagtcttttctttgccaagcaaaacagtttccaccacatcttgtctatagatgactacctttctggtcaaggctttggacatctcttcagtcatcagacagagtatctctgctctagacctcgctggagttcaagcttgaattattatatgcaagttaattttacaagcctggatgaggctactgaaaactggaaaaaagctacgagactgtaacaacccttcattctttttcatttccaaagctctctccccatctcaagctagaaaatagtgtaaccagactacacaatggaaccactcctaaaaaaattaatattagcctctcagcttttatctaaatgtaccacagtttaagagccttgtaaaatttgttccacaactttactataggaaaccttattatagaagggacaccacagaactcaatggcccacacatcaaagtcctcgagtttaggactgaagaaaagtctgcttttgtagaaaatgtgtatgcttcatgttctcttttaccagacaatgagaataactcatactgattcctcatttttccttgacttccaggaatgtctgtgataaattcaggggacaattgcgagaattatcctcagccataagtccctcacatggttatcacctgtccattatgtatctttttgtccttcattttaacatttcttttatacatggatcttaaagctgcctgaaattctttctgaaggtagatggttacataataagtgacagggaaccatgaacttggatggtttataaagaacctagattccggacctgcctctttagcaacagctggatgaccacttcagtcatttatacctcagtgcccacttttaacatccttaaacaaggactaattgtctcaagtaattttcttcaagtcctaaggtttttactggcagagctaagacctcttaacgtgtctgagaagaggcacagttttcactagtttaattgcaactgatttatgctgctgtcaacaccatagcatccaaaaataacttctaaatgacaatccatttctaactcaccacaccctcaaagtattttgtctaccccatattaattagctaattttcatttatgtttaaaaatatatatatagattttttttttttacctcttcaagccgtgttcttgtggagaattgatttgttgtacccattaccatgtgggctatggaagatgagccaagttcaaacctagagagggaaatattcaaaaacgggttgtgaaatacttattcatttaacatatattttaagggcctcctatatataatagctttcagctaaaaactgatcggtgtgaaaaatacaaaatatgatgtctatccaatgggttaagatctagctgtaaagaataatacacaccaacagcctaataaaaggttaagtatccaacagaaaatgacagaagcaggaaatgctataagagttagacaaagacagatgtgaacaagcaaatgtgttcatggaaggcctgggctgaactgtgaggaggaaggcttcagatatgtccatgggctcaggaaggggttatgccagatggaatggaaaacatccctgtccagattcactagttagcactgaagtccagttttatgttttctacaaatattttaggtatttctactgcctatcttcaatcaaaaagtacctttagactgttactgttcttttacaaacagcaaggctaaaacacagtaaggttatgaacttatccagtcacagcacaatttttggcaccacttacttttgtacaagtttgttccagtttttcctcagaaattgccaggccagtgggtatcctactgggttcctgccaatgagtgtaagaatttgtggaaactcctgagtttttattttatctcccttaaagctttcatctagtagcctagaaggattaagaaaagaaatgttagcaatgaataggtgatgaaacagttatgaatcactgcaataaaattacttgtaaaagaaaaaaaagtctgccagtaacaaaggttaaaaagataaatgggtaaccacaatcctgataaacccactatagctacataataaaaactaacatttatatagtgttcataacacccattctcatataccctctcatttgctcaaaagaatagttaaggaagagtagctctagtaaatatttttaatatgttgtcattttaaagatgcacaaatgtatacacctttaaatatttttcctaacacctggttctccctaattatttgcctttctcattagatgtgtgctgacttgcagtatgttcccagcaggataggcaattcctggccaagaaaacaaaaatagatgccagaatgatctaatctaatctaatttcccttggccacatgaacatgaatgaatgacggactcaccattgaagcttttccttattttgggttctgcagagggcaaattcaatttggcttttctcagtactggacaaagaaaactgatatttactataaagaaaatcccagccttctgtgctctgggcccccacagcaaacactgccaaggtcacgtcgacaggcaggctatagaaaggaacacactcggaggcccagtatggtggtgagaagaaccagaaggcactcaaaatttaggccagaaggatacgggtatgaggagaaagagataatccttcccacctgcatgcttcctcttaggactttaggtctgcctacatgttgaagaagtttgagttttaggctttgggagcatttccttaaaaaccattgtcatgggggaggaaaaaaaaagggtagtgttaattctgtcttcacacactcagagatcatttggttgggctacattttatgagctatattccataaagatgctgcaaagttcaggtatctggtttaggaaagaaaaaaaaatcccttctttaacccaagaaatgtaatgcaaacaacttgggcctgtgtcacttagtcttctaagaagacttcaaggctgttataaagacccagtggtgggagaaacctgatccggtatagcggggccagaagaagctgcgggaccatgccgcggggacaaggcaaggagtttcgccaggatgttgatctcctggttatctacacttccgcctcagtatgatctgaattattaatgagaaagattaagatacagattccttccttcaagtgccttagtagtcacagacaggaggttaattataagactaaaagcaatcttgggttgttagaagaacttaaaggaaaacacctttcaacttcttgttatcaatcaatcatttttgtctttagaaatcaagaatttgaacaataacagctgctttcagaaataaaccgcgactttgtgcagcgtgtattacctgacgagctgaaatgcattgttaatgagactcgcccgatcattactgctgactgctgtgtgtgttccttttaaaaggccagtcaaagagtcccatccatcatcctcgtaatgcacaatgtaatagccattcatgcccacattaaatttgatccattccacctcttctgggaggatgagcacatctagagtaaataaaataaatcaaagttc

SEQ ID NO: 803 - DNA, 4054 bp, Homo sapiens
ctcctgacctcgtgatccacccgcctcggcctcccaaagtgctgggattactggtgtgagccaaggtgcccggcctcatcagtttccatatgtgctggactgctcgatgtctctgcttggtagagacctcttatgtaagttacaggcatgagttgtctttgacccagagatgcgccagatgtgcctccaggtaccctcagaacacagattgtggcgacaggccctcctgatgaaatcggagacttcacaccttaaggtagagatgattccacaggaagtcctcaacaaggtaaagccgaagtatcagcatccaaccaaccaaggcggacaattaatgtgaatccagtagaaatcaagctgaaggaagggacccaacctgttcgaaaggaacaatacgccttaaagaaagaggccctagaaggcatccagctggtacattctgattcttgtggcatgtcttaataagactttgtcagtctccatagaacatgcccattcttccagtaaagaaatctcatccatgcaagtacaaattcatgcaagatataagggtgatcagtgatactgtagaagacacccaccccactggggccaatcaatacactatttttatcttcctgtccagagaccatgaatggtttagagtattagatttgaaggatgctttcttttgcataccagcgaatgcagaaagccaattattgtttgagtggacagaccctgaaacagccacacaatttcaatattgttggacagtgcttcctcaagggtttaaaaattccccaactgtatttggggaagcactggctcagaacttaagagacttacaattggaaaatggggtactgctacggtatgcggatgatttgctaatctccagctccttgaagcaagaatgtcaggataacactgtaaaaactaaaccatttggcagcctgtgggtacaaggtcttaagcaaaagggcacaggggtacagatatgcaaacaaactatgggatacctaagatttctgttacagagaaaccagagccctgacggtggagaggcaaaatgcagttgcctctatcatgacacccacaaccagaaagcagctaaggggcttcctgggaagggcagggttctgcagaatctggatttccaattatggctgaaggtaaagctgctatatgaagtgataaaaggggccaaccacaacccctttaaatgagagctgtaacaccagaatgcgtttaaacaattaaagcttaagatgacatctaccccatctctgaggctgccaaatcctcataaacccttgcaactttacgtgcatgaaagactgggtctggcactcgggatcctaacacaaaaactaaaagaaatattgcaaccagtggcttatttctcaaaaggattgatacagtggcaatgggctggcccccttgtctcaaagcagtagctgccgcctgcttgttgctcaagggagctgagaagctgactttgggtcagcccatcgtgatttatgtgccccatcaagcctggtgttatttgagcagaagggtggctactggctgacggttgtcagattaggctgatatcgggccatcctgcttgataatcccgcagtaaaactgcagaccactggagcctcaaaccctgccattttgctgccacctactggggaacaaaggaactagtacacaactgcctagaggttataatcaagtattttctggtctcccagatctaaaggatgcagccctcccctatgtagactggttgctgttcatggatggaagcagcttagtcaccaacaaaggagaaatgctgcctatgctgtagtaactctcttggaggtaatagaggcaagaacactcccgacagggacttctgcggaaaaggctgagttagtcgcttttaccagagccttgcaactgtcccaaggtgagagcaccaatatctacactgattccaaatattccttcatgatagttcatgcacacagagctatttggaaggaaaggggactgctaaaagctgataatactgaaatttaatatgctaagcaagtgttggagctgttggaagcagtaacagcgtcaagaaaaatagctgctatgcattgtccaggccataagagcagcgatttcaaaccagctagggggaacaccttcacctactgcacagccaggcatctagccagcaccagtgccaaggtccaggcacctttgatttcccaagtagatttggcagctttcaaaccccagtgtagtttgaggatgaaaagattgccaaggacaaagggtttatttaagacaagaaaggctggaaagtaaataacaagggcctggtttgggtgccagcacaccttccttcaacccaatgctaaaatatattcatgatagcatgcattttggatgagatgcctcgttaacttttgtgcaaaaatataggaaggaaaaggctcacttaagaagtataatacaacattgctacctttgcgctgaaaatgagaccaataactatagcaaaggacaacccagacaacaggcgagagggaagcatctactagaaaattggcagattgactttgctcaaatgccacttgcccctggaaggtacaaatacctcttagttgtagtggacactctcaggctgggtggaagcctacccatatcataccgagtggccaacagaggtagttaaagtgcagctaaagaacatcataccccgatatgggctccctgacattatccatagtgacaatgggccttcatttacctcggaaataacccaacaagtaagcaaaacagtaggaataaaatggaagctgcactcggcatggaagcctcaatcctctggacagactgaaagaatgcatcatactttaaagacaattcttgctaagctatgtcaggaagctcagttaaaatggattcaggtacttgggattgcactactctgggtaagaatggcccccagaaatgggattaagttaagttcttatgaaattattttcgggacgccctttgtagccttgtcctgggttgctagagtgtcactggatacagaattagctattaaaacttatgtcactcaggacgaactcttaatgatttgcataagtttgcttcttagaggaatgacacagattttgcaggagaccgccacccatttcagcctggtgatcaagtgctgctgaaggaatggagggaagctgatcctgcccaacaactacaggaaaaatggaaagggccctacgatgtgctgttgactactgacttggcactgaagctgacaggcatcaaaccctgggttcatcatatgaaaagtctttctctaggacctggaaatgattgctcggaaatgtaaacagcaaaaaagttagagccctatcgcacagcttgctccaagtttcaaaattaccttctgtccctcctggacttgggaccattatttttccttcagatatgccagtcagcaaccacagatggcctccccaattaccagactcactcagacattgctgccttctccagcctctttaaactttaaaggccagcagagaatgctatgtttcaggatggtgattggtggttttcactttggaccataagcatccgtattgtgctcacctgctgctgtgtaagacatgcctacttctgctttcaccatgattacaagtttcctgagacctccccagccatgcagaaccgtaagtcaattaaacctcctttgtttacaaattacccagtcttggttagtatttttataacattgtgggaatggactaatactgtctgttttgttaaaagactaagtttcaattgggagccaagatgactgactagacacagccaggggaaacaactgacaagacactgagacattgaaatttccatcccattctgagcctatcttcagatgaaatgcattgcaagtgggcagagggaggacacagatgctggaaacccttcatggtgtaccaagtactaggaacttaagtccactttttctgagccctgcaaaacatcagaacttgctcagggattgccatcattgtgatctagactg

SEQ ID NO: 804 - DNA, 7094 bp, Homo sapiens
cagatctcgtgagacttattcactatcaggagaacagcaagctaaatcagtgtgagaccaaggaccctggggctcctccagtcattgcagctgtatcacaactaccctgacaggtgagttgtactaccctcattttacagaagatgaaactaaggttcaggatggttaaccaacaaaggtcacatgctaataaatattaaagcttagacttcaggcctgacttcattgattgggcattttatcaactgtatatatttagagttctaagtccattgttgaaaacttgagattaattccagaaagatttggagatacatgacatgaaaggaaggaggtcatagtttttaggtcaaatgatgtaacaaagtcaacatgtcacacaattttcattcacctcatgctgacctttttaaatgaaatgacatgggtaatcagggtcacccttcctggaactaggtagaaagaagtgatgtttcctttagctatttaaggatcagcctcctacattcatggggagcttattatacagggcaatgtgacaggcaatggggatataaaataaatgatttcataccagaaggtgttttgagtcttaaggaaggagtaaatatgcaaatgagtaaattccatcaagtttaaggcaccattaacttatctcttactttcctttccaagggaaaaaagatgtcaaactatatcatgccttcagttgtaggatttgaatattccttttagaatcaattacgtagagtatatgccatgccagatgtcaatgcatttatagtgatgatgttacagctgggatgaagacgggcccagaagagagtcagaaaaatctttctaggccaagtgacctttgaatgtggaaagaggctttacaaatagctacttttatatcaaactacatgcaactagttttctgtgctggacttccatagttgtgaagccatgattaccagaatttctgattcaaagattcttgatttcttgctcagggcaagccacctgccatgtcttgagaacactcaagcagcacatggcgaggaatggagatggacagacatgggccagcaagaaacaggcttgccaacaacagcttgcgtgatcctgaaagtgggtcctctagccccatgtgactgttgccctggccaacaacttaactgcaacctcaagagatacctaccctgagtcagaaccacccagtcaaactacccctggcatcttaactcagagtaactgtgagataattactgtgagataattatgatgattttaagcttctcagtttgggggtaatttgttatgcagcaacagataacaaaacacttagcaaatgttattccaatgttatttgattgagggccatagggatacaggagaaaagaaaggtgaacactcgggtttagaaaacaaaagaaattacaatcaatcaaattatttttctaataaaaagtgggtactttgcaattttgccttagcttcattttaaggtagatctatgtcagagttcaaattcagtgttcaatgacttactgcctgactgtacaatgatctgtctagtctcctaaaggaagccagaagaaaagaagagtgatctggtaaaaagagggctgagatcctccaagaactgagtttgtgttccagctctgtcactatttgattatcaacgggcaatttatgtaatctgttttaaatcatggtttccataccagtaaaagggatataataatttagatcctgcatatcttgagactagatgagtcagtgtgtgtggtgctttataatactgatgtgtttttgacttaacaggccccgttgactggaggatggccatttgacaacacattatttcctgaggaaacttttgacttctggtgacttgggccccaggcaagctggctgaatttgccaagacccggctttgcccttgcatgtgtgaaaaatggcctcaagtatgaccccatggcaagatggaaagaaactgtgctcttgaatagcttagagattcagagccccccaaccagcttgaaacgcccacctcaaaacaatgacatgagaagaaacaaacctctaatttaagccactgtctttttaagagcattgtagtttgagatctctttctttcagctgtttagtccccagctaaacacttactgaccttatcttacaggtcaagaaaaatgaagttctggggtacaagtcactaatgtattagaaattttccagctctccctccttgcccagcagagtatatttccactcaaacacaatgaacccatttggaatgggacaaaacaaaatggggtgggcctggaacaagagaaagttcagctacacaggatccaggtcaaaactctttaatcctcccatttctggatttcaaatgaacacctttttgtctagcagttctcctccagaggtttgctttcccacaacagcttgtcaacagtgtaagaagttcaaaaagaacttttggggttgcacgttgcaggttgtgtggcatcatcccagcttgtctcaacacctctgatgaacagtagcggaagaaaggactctttccacatgagttcctcggcggtccccgtctcttagggagtttataaaaaaatccatcatcttgttctactaaacccaagtaaatataattaacaccaaatgtgtgttctgctcatcaaattgtacagccataaagagataatctttgtaaaataaatgactaggcttccttgataagtcaataaggcaaaaaccttgggagtaaattaagacaaatgggaaaccagctggaagaaatcaaacaggcaaagcaggtggggtggcttgtgtttgggaagataaaacacagcatgaagcatttgcacatttacacaaaagcaagatctataaccttatgctttgaactgagctaaatgcatgacttatttaagaagagctggtagctgggaactggttgaactaagagtgtcaagaccaattctgatgatgttttcttgtactttgcctgtttttacatgctctgaagattgccaaacaaccagcagcagatggtcctgtatctaagtgcaatgctaagtggtgtgagggatggcatgattgaccatttactcagaggagcataaaagaaggaattcttgttaaaaatgcctctgttgtatcaagtggctgtaaaacaggcaagagaatctgggaactcttatatccaagagcaagatggatacacttggattgaaaaatgcagccaagacccacaaatgccaagtccttgccacagaacaagctgtccagctggaagaaactagaggaatccccaaaccatttgtcctctgactcaagaacaccagaattataccaagacaaaactgtgcagctatcactgttctgcacaggtgtaccgccttgtgaagtgatccgggagacttctgtgttaccaaaccctcctcacatacactcactcccactaaaacatctccttctatacaaattagaaactgaggctcccagaaaacaacttgaaaggaatgtagagaaacttatgattgtcagatttagcaaataaaaatacaaggatgcccagttgaacttgaatttcatacaaactacaagtaatttttaatataagtatgtcccaagtcttaaaagaggactacaaataatttgttagtgtgagtgtgcccgtaagtatttgggacatactcacactaacaaattatttgtcatttatctgagattcaaacttaactgggcattctatacttaacttggcaatttgaggaagggtgaaaaaagagaatacattattacattgcatcatggagatacagaccttaaaaataaaaatgttgtaggctgaggccaagacacagaagcctttgcagcagtgctaattgggcattataagtttatatttattaactcttttcagaaatcataatcttgaaggaaaatatcccaaatcatctcaatacagacaatatccgtacaaggatactacttgacatattcaatcaaaacaatatgaattcttacaaactaagaattggactagaatttagaatgtatgctcattggccttttagctatttatagctggagtcccacagataccaaatgtcatgaatggaaatccacatgcccatcattgacaatctaaacagaacttgtttgattaagaataaaggaggaggaaaacaacaaaggaaactatatttcagaatatgggaacgtgattactatcccaagaatataaaaaagtatttttatactatctgacataaccaaaagaatatgaattacatgaaacaagagccagaaggtacaaggatgaattaagaagcttgttaggcgagttaaagacatttcaagaaattgaaaatataggagtattagagtctttattgaaatcagtgaaggaattgacaatgtctatcatcgaattagagtttaaatatcagatgctgtctcagaactcataagaaaaatcaatgataaagagatgatagctctaaaatggtaaaaaaaaaaaaaaaaaaataaagtacacgagttaatttaaaaaggaaaaaaaggtttgcataagatttgccttctgcaacaataaattccagaagagagtagaaaatatctataacatttgagtaaatattgctcctccaaagtacatatttactcggttttccttgtgtaaagaagtgaaaaagacattctcacatatgaaagaaccagaaaacatatcacgtgtacatttcttgaaaatacatttcaatgggaagtttaacctgtgctcaagaaattaaccaaattattaattcaaaactaggtaagttctggagaaaaagccctgacagttttcataacaatctgaggaacaccaaggtccatgctggctgagcagtgtggtctctaacagcggtttttaaatatgaatgcacatgataattactgggggagaacatttaaaaacatcgagattagacccccgcttcagattaattaatcagaaattcagaatagtggatggaaatgtgggcattgaaagttttaaaagctctgcggctgattttaatgtgtatccagggttgagaaccatcctttagataaagaacaagcatgaaatcaggtctgagtttgaactccttcctatgatttatgggacatgaggtgattgcaggcagatggctcaacccacctagactttatcagttttaaaatctgagataattgtgtctctatcatattattagcataaaattagaaaatatatgtcattcaccaaaggtggggttacacaatttgtagccacaacaaggcaatattttcacagtattttctgggaatggcagtatgcatatggtgtttttatttttccatcataaataagagttttgtagttaagcaggcgtttctcctgtacaccattaagttctatgtaattctaaatatatttcagttctgcagagagcagcagctcatttgccaacctttaaggacctctaatatctgtcgactcccacttttaatctgaaccaaacacactgctctccttgccaaatattcgtgcaaacccaaatggtcccaccatagccctgctcacttctgccttggtgcggctgctcacatgggtcactggctcacacctgctgtcttttcctctcattgctctttcttaactctagctccaattgaccttctatagtgccctctaaatttactacagttctgcagtaaatttatatatttacttatatatttatatatttactaccttatatatcatagtattgtattatttattatcttgtattgattttccccaatctaaactttagtttcctgtggatggtgtaggaagaagaaagggtgatatggaaagagtatttaacaatgcacagaaatgctcatcagtggtattgaaacaaaagtagttcactaaatgaatctataatattgattatggaaaattgcatttggcaaagactgaaaaaaaaataaactaaagggttggcagtggtaacctcttagtggtaagattatgagggactattatgttttcttcatatttttctctatttcccatgagctacatttattagttctatagtgagtcagcatacgcaaaatggcatatacaacaaaatcaaatttttcagaaagcaactgttaaaaagatatgaggaaaggatacaataattattaacagtattcataaaagaagatataagagtggcaaataagcacatgaaaaattgccaaagattatttatcaaggaaatgtaatttaagccacaatcaactattactacacaaaccagaacataactaaaattaaaaggtctgacaacacctaataatgaccagaatatgtatctatattaaatgttcacagcaatgcctataacaaaacattggaaataacctgaccctagagaagtagttggaaaattgtttaacttcaaagcagactattttacagccaccaaacgttatgttttgatagaattttaaatgataggttgaaagcttacagtattaacaaagcatgtcaattatcaaaaacagttaattctgggggggtggtgagagagagctaattttttgcctacatagttttccaagtgtcagtatgcattacttatatcagaggaaaaagcaaataacaaatattaatgtgatgacttgtttttggaatacaagtacaattacctcagcaaaggagttcatgtttcatgaaccagtgacacttaatgctgattgttcaatgacttggatttcttaggtaatagctttacttgatatattgtgtatttttggtttaattgttggtcagtttggtattccatatggtagtgctactcaaaatgtgttgtgaacccttggtggcccatagagtcaaaactattttcataataatgctaaaacattatttgcctttttcattgtgttgacgtttgcagtgatggtgccaaagcaatagagggtaagactgttggtgccttagcatgaatcaagatagtggcaccaaacttgactagttatcactgtattctttgctatcacatactcactgttaaaataaataaaaaatttaaaaattaaaa

SEQ ID NO: 805 - DNA, 2606 bp, Homo sapiens
ttgcctctggctctgaggcggcggcgccgggcgctgcgaaggctcggccgctgtagtcagtggtgtggggtgcgcaagggcacggacctcggagctctccccgcttgcgccgagtttctcagcgccttccccacccaaaccggggtctcgcagtcggaagcactcagagtgcagccccgcgcggggccggtcgtaaccgcgccgcgggccggacgatgcccaagaagctgctgctgttgcccccgccctccgcgtcctcggctttccgcgtcccgcgcgcccgccccgttcccccgccggccatgaacgccgctcgcaccggctaccgagtcttctcggccaactccacggccgcctgcacggagctggccaagcgcatcacagagcgccttggtgctgaattggggaagtctgttgtatatcaagagaccaatggagaaacaagagttgaaataaaagaatctgttcgtggccaagatattttcattatacagacaatacccagagatgtgaatacagctgtgatggagttgctcatcatggcttacgcactgaagactgcctgtgccaggaacattattggggtcatcccctacttcccctacagcaagcagagcaagatgaggaagaggggttccattgtgtgcaagctgctagcatccatgctggcgaaagcaggtttaactcacattatcactatggatcttcatcaaaaggaaatacaaggctttttcagctttcctgtggacaaccttagagcctcacctttcctgcttcagtatatccaggaagaaattccaaattacagaaatgcagtcattgtagctaagtctcctgatgctgcaaagagggcccagtcctatgcggagagactgcgtctgggtttggccgtcattcacggggaagctcagtgcacggaactggacatggacgatggtcgtcactccccgcctatggtcaaaaatgctactgtgcacccaggcctggagttgccattgatgatggccaaagagaagccaccgataactgtagttggagatgttggaggccgcatcgcaatcatcgtggtatggttatatgtcatccatgtgcagaggtggcactcctggctcttggtcagtaggttgtccactctgggactgtatttctaggaacgatgatccgaatggatccatgtatcctttctcacccaaactcccttgtgccaagtggcagaaacctgtatccaggtgaacatacattaaagtataacctacagataggaaatgagcacagtactcccgtgagaaaattcagcaccttcaccttcatcatgtggattctaggttctttaaaccagctcacctaatcatgcttgagcgttagggccgaaagatgaactgaagatgagctgttccgttttcacaagtaagaatgggtgtccccgtgcagactcgttctgcatgttgacatactttttttcccagctctaaatatctgctggctagtgggtcatgagtcctttgcagtagcacactttatttcagttttcttctcatgtcacagtctatttgaaaaaaaaataaatggaacgctggctatgtgggattcaccagaaacgtgagacaggaaaatgagtgttggcaatcctcagctccagccgtaatgtcacaggtgcttgactgcgcccgcctctgacagacacacaaggatgacattattgacgatgtggagagttttgttgctgccgcggagatcctgaaagagagaggcgcctataagatctatgttatggccacccacggcatcctgtctgcagaggcccctcgcctgattgaggagtcctccgtagacgaggtggtggtgacgaatactgtccctcatgaggttcagaagctgcaatgtcccaagataaagactgtggatatcagtttgattctttctgaagccattcggagaatccacaatggagagtccatggcctaccttttccgaaacatcactgtggatgactagctttcacgagggtctcgaccctggacctcctgagggaaacatggaaaaagcagtgccatgagtgatacagtgtttccttgcaagggaggactcgaaacagcctggagttagatatcttcttttgcccggattgatggggaggagggattaaaagagtcaggaagaagacagagctaatggataaatatcataacatggccttacatgtctgctgtcatcagccctgttccttaaaagttctagctgctttcttaaaaataatctgaaaatcttattgatactaaagaggagttaaaggcacataaagtcttaactctataatgttcatttagttgtttcagctccagggaaatggaggtattgatgttgaacctggttagggaagctgagcgcctgtggccctattactatccagttggcctctcccaaatcaacttcaagtcttttatagagaatcgtatttttctttcagaaattgttatgcctacagccattgaaaaatgaagcattcatgttgttacatcttccaaggatgtcagattagaaaatagcatcccacctctgggtatctgagtggctctgaagttgcaaataaaataatttgttgtctt

SEQ ID NO: 806 - DNA, 2196 bp, Homo sapiens
agcccctgccaggggcgcctggcaagtgctgtgcccacgtccgcccaggacccagccgtgttgagtgaagctcttggggccagcgtgcgtcctgacgcacaggagagagctgaaggctgtgacaaaccctgtgcccacgctgcctccactgccgggagactcagggctgggggagacatgccctggtcaccactgcggagactcagggctgggggagacatgccctggccaccagtggtgagccagcgagacaggaccccacgcgcgctgacccggggacgccatggaactcactcgcgattcctgcacgcgcgctgacccggggacgccatggaactcactcgcgattcctgctcacagcacgtttcctgctcgaaaaccaggagagcctccacgtgccgactagctctgtccacacatccattgcgcagctctgcagcggaaggaccttcagtaaagacgctggtttgtaacgagagaagcgttccaaagtgtcacacgacattgtttattactaaaaggagcagaatttctttttaatcttgacagtgttgttttcgtaacagtatgatttaaactgttacattcatttaggaaaactttttttcatttcataagtaatcaagctatctttccagcttaaaagcaaagaaaaaaggctcagggtaactttttaaaccacttcatcaataagaaaagttctctctgtcattgcacggcgtgattgtacacagtattagcaagcagttcacatgcgccagggccgacttggaaggaaacacaggttaacactgtttcctgtccgagttcacagagatgtttgcagcaggctcagttgctttggcagctggagcgagggtgcctcttccgcgtggctcccctgagcagagaggcccctgtggtttttttctccgccgggctctggggacagggtttctgtggaaatggcaaatggtgcagatgagcagagtcctgctagagaggtcagctcagcgtccaggagggggcgcctgcccccgaggaggccacggacatgcctgggaagttgctgccggagaagtgtgctctgatgtggctacatttggggacgcgggctccccagaggcccaagcgagaaagccgggggttcccaggctgggggtgcaggacgggccaggcactgccctgcagggcccgcccccctgcccctgcaccctcacacccatcttcctctctcagcctgaccccagggcctgggagcccccggcagaccggccctccttgccaaacagtggctgccctttatggactcggcgcctggcagagccactgtggaggaggagttggctgtcatggtcaggggaggcagcccttgggttgtcaaggttggtggtcaacgttgaacccatatctgctggaatctcccggtctgttccacacacgatcatgcgggaagctctgggacccgaaggctgttctgatctcgggggtcacaagttctcacagcagcctggggtcaccagggaccagacccggcgttagcctctgtaaggagctgcctggctgctgggctgagctttgttgcaggcccaggaagatgaccaagaaggacagagcagagccccatctaccactgctgggagggcccgagggagcacgtgcacagcagagccccatcctccactccctgggctcgaagaggcttcctcggtgtggatggcagctgttaacgagcagtggtggtgcagctggaggcctctgtcccatggggcacagacgggagaaggatggcggacgggtgtgcacgcttgggaggacgggcgggcggcataggcctgagcaggtggcatgggcgcacgagaagggtgtgtctgagacaggatgtttatcccaaatgccaggagtggacgaggcggacgagtggcagtgaggtaggcatgtgaggttgttgcctggcccactctgccgaccccagaaacccagcggcctgggcccagcacccggctacacatggggctgagccagcaacctccttggcacctggggacagtcgcttcctcagtttctgcgtaccgactgcctcacctgacacgcggcctgggcgcgagagaagccaaccaggtgcctgagttgactgactccttccgccctccagcttcctccctccgccctccaacctcctccctccaccctccaacctcctccctccgccctcca

SEQ ID NO: 807 - DNA, 2427 bp, Homo sapiens
cctgcgagggcttggtttagggcttcggctctctgcgttctcggctccgggaggcctcggtgattcagccacagcctctgcctcccgttgctctgtgacctgagggtattggacaatttgtagctaagactcccggataccctgaagtcgggaaatggaactcgtaacattcagggatgtggccatagaattctcccctgaagagtggaaatgtctggaccctgcccagcagaatttgtatagagatgtgatgttggagaactacaggaacctggtctccctgggttttgtgatctctaacccagacctggtcacctgtctggagcaaataaaagagccctgcaatttgaagatacatgagacagcagccaaacccccaggtagacagagtctcactctgttccctaggctgaagtacagtggcacaatctcagctcactgcaacccccgcctctcaggttcaagcgattctcctgcctcagcctcccgagtagctgggattacaggcacgtgcccgccaccacgcccggctaattttttgtattttagtagagacggggtttcactgagttagccaggatggtctcgatctcctgacctcgtgatccgcccatttcggcctcccgaagtgctgggattacaggtgtgagccactgcaccacgtcaggattgcgtcttatgttaatgcgaaatatgcatagctgtcatacgaagtataccaccattcccttcagcactctacgtcagaggaggcacgtcaggggagacaaaattcctcttcggacagtccctcaaaagacaggaatgtggacatatattccacatttctctttgtctcctgaggaagaagcatagagttgggagtttctcctggattgcaccatgctgtattgggaggaggtcaggctgcgctgggcatatctaataagctttttcttctcttctacatgtttttggcattgtgctcaactgaagtagtacaaattcttaactatgttcaggaattctcacaaaggcaatgtgatcagcgtggtgttaagttcatatatctatgaagaaacgaggaccagtggtgtttgtttttacgcttttcattttaaatttatattttatttattattttaatttttgtgagtacgtagtacatatatgtatctatggattatatcactgattttgatgaaggcatgaaatgcacaaaaataacatcagataaatggttattcattgcctcaactatttgttctttattttacgaacaatctaataacattcttttagttacttaaaaatgtacaattaaattgctttgactatagtcactcccgaccagagaaaaaccctgtagacattagtcactcctcattctgtctcaaaccctctccctgaccctcagccctaggtagcaactacctagtgcgatcaatcccatatgcatagattaccatattgtggacatttcctataagcggaattgcacaataggggagctgttatgactgacataacacgtagcacaatattttcaagattcgtccacattgtaggcttacccacagggggaaaccatttttttgggggcttttagtaacaccggtgttttctccttccttacgtccttctttccttccttccttccttccttccttccttccttccttccttcctgacttccttctttccttccctccttcctcctatttctctcttactccttctgccctctctctttcctatgccttaggtgcatcccacattctgcgtttttttggggaaatcctcgacaggtgcaggaaaattgtgttattgtaactatttaccgttatctctctttcacggctctccatcagttgtgaacatctattggtttatcccaagtcactaagcatattttcattaggtaaacctgtttttccttatacagctgtttctggagtatagggtcgcatactcataaacccagtgtaactcagaaacgcatctaatattccagtaaacccatcataacgttgaaaaatcgtaaatcaaaccatcataagtcacggtttgtccgtggatatgggcgtcatcaattccattgtattcagtaatgctgtacaccattaacaatggcagactgattgggagtggatattgatagcattataaaagtcagttattagagggatacttctttaacctgactgaagaactgatctaatggctttagtacagtgcatgattatgtgcgatgttttgagacagagtagtacatttgtgaatgaaattttatggcttttttttcacttagtaggaaccattgtgtgtggaaaagtgagaaaatggctttctgctgtagggtctggcattcattgtagatgtaagcttatttttctgtgagcaaatcttattcaataaaatactactctttatactaaaaaacaaaaa

SEQ ID NO: 808 - DNA, 5571 bp, Homo sapiens
gaagaacccacacagatgtggtggaatccagcagccttccacatgcacacagtgtctgcagatgatgcctcttcaccgtctcttagataatctcatcacccccgaacaaaacccatcctttccacccggtagttaagcctctgaagatccgcagacccttcagatccagatcaaaatcaaggtcgaggtccaccgaagagccagagccccacgccggaggagggcaggcccctctccaaccgtaaacgcttctggaagcgcggtgggccaggcctgtccttcgggacgtgactgaagtgcagcggccgtgctcaacttctctcgggagccccgggcgccgacccatttccaagggggaatccccggtacgtcgggggcggtggcggggcgcgcgccccggacacactcacccacgcgcacacctggctggcggttgcacggcacagagggggctgtcgggcgtccctacccgccatcctccccaaactccctccccagcccagagccccgcagcccgggagcctctccagcccctaacaccggccgcgcgcagccagcggctgctaacaggtaccgggcgccttcccacgcgccgggcgccggccgggcctgcggctgctcagcaccccagcactgctggagcaggcggcggcggagtgcgggacggcggggaggggcgcctcgcgcgcgccctgccacactcaccaccacggcatcgctgtcggccactgatcccgccatcttcttgcccggcgcggcggggagaaggtatgacatagctccacctacatgcaaggggagccaggaagtgcaatccctggctgggctgccacgtctcagaaaccattaagcctatggaaggtctctggatttgatggcaaatggcagcagaaatgtggaaaagatcaaagtgatgtcaaggttgatctctgagtttggcatggctgaactcaaacatcatttgccatggacccacagtgtcttcagtagctgagtgtggtgtcattcccctatgatatgtgcactcaattgctggccagtttttgttttttgtttttgagagagtctcgctttgtctcctaggctggagtgcagtggcacgatctcggctcactgcaacctccgcctcccgggttcaagtgattttcctgcctcagcctcccgagtagctgagattacaggcatgtgccagcaggcccggctaattttttttgtaattttagtagagacggggttttgccatgttggccaggctggtctcgagctcctggcctcaagtgatccacctgcctccacctcccaaagtgctgggattacaggtgtgagccactgtacctggccccaaagttttagaaattggatcattttaaatgttggaggggagttcattgtttaggatggctgtgtggcaaatctttttttaaagtaagtaattctcctctattataagtcacctcctgatctctacatttaaggtttgctgtcctggatgtgttcacctatgaatgtaagtgtgctgagatacacagtgcaaggctgaagtcagagtacaccactgatgaacccctgggaactggtaacccagccagggaatgaacatcttttatgaatcagtttatccaccaaacacttgcagagagcctatcccatgccacccctgagggcacggtgatggagaagatatgcttcctgcctccaagaaccccatagtctagtggcagagacaagcaggtacatagctgcctatagtacagcatcacaggtgccataacattgtgtaaactgggaataattctattctctggatatagaacatctaaccaagatattgagtatctggcttccccttccccacactggccctcactgggatccatgtctaatattatgaaagtcacacaatatcattataaactaatcataaatggcactgtcagtttgctacaaaaacttattcagaaaatattcagattctcccatcaacatatgccgctatgttggcaaaagctctgatttaaaatacttatttcgttttcctctccgattttgttctagtcttcaaaatgatttcatacaacatagcactgagttccttagttcctctgacccctgccagatctgaagctgtgatgttcaaaagtcagggcagagtccatcttatgattgagtttcataagagtctaagccactgatcaacatactgtggcagagtaagctttctgggttccagaatttattgtgagtgggctgagggagttgagaaatggcatgggaggcctaaagagaaaataacttttgaatgaaaattataggaaagtggatttgagatcaaaacaaaggaaggttgatcatagttggaatcatttaagattggtgggggtagtgggcttctggttcttaacccaggccaggcagaggtgtgacaacagtcaggggtttctaaacagggtgggaggttagatgagaatagccttcaaccctttgtgttgaactaaaatcctagctctgctttcaactcctagactctgcttcatcattgctaagttggaaagagcaagcaattgagagtccctgctggccacagctggggtgccccagaccacagcactgagcctcaaaggcaagtgagcatagtgttgggagctgggcttctggatccatcaactccatctgatgactcggaagttccttcagttcccaacactggagtccagcaaggctggtttgtcttgttttaattattatttagatgactgtttggctcatacctgagcaaggttcaaatcaagtcagacctgttaatttaatcaaagttatataatcacatttgggcacttaaatgtaaaccaattatgttggaagccaagtatcttgtactcaggagggagttctaataagtgctgggaatgtatgctaatgcacaaagcctaacccccagagtggagggtggagcactccagggcactcctgtttcggtgacgttgttttaatagctagtgctctgggtgcagtctgggaagatattggaaacatctcaagcaagtatgacatccattttacccaagcccatggaacccattatgtttggaacatgtctgtctgtggcatttggcttggcttataaatgcactatcagaatctataggaggccttcgcaacaagacgtgtcttggcctttctggttatcagcaatccctccacctctctcttaacaaacatatgccataagtcctgatcaggcatttagttttttcacttggaccttttcctagttcctagtctcaaccccaatgcctcctaatcttgtacttcttcaaatactggcccccctctactatgagagagagaggaaagtagggaggagaaggaggaaaagttattgagttgatatgagggtagtcaacctaaagcaacaatcaggagtaaggtactggacttgagtttgaagtgtttgtcactaaactctctcaaactcttccaggctaactagcctcagagggcttctagcccatagtctccttgtattttctgccctcctcacttggagtgggagggaaccagatgtccagtctttgtcccgtgttaagaactggcctggcaggctttgttgagaccatccagacttgaaagcctcacaaccagatgccatcacaggcactttctgctcttaacctttgtctgtgtctcctacatgaactcatcagactgcctctgaagagggacattctagggacagtttcatcttcatcaccatcctggatagggaacccttccagactcagagttgcaaaagtcagggaggggctgctcactggaggtggagtcctttggccaggtttcactgtaaacacatggctaaaatgtgtcgcacatggacaggcatgctagtgtgctctggatacatgctagtgtgccccagatatatgctagtgtgccccgtatagcttctggctaaaggacacacctcagcaaggccaaatgaggcatcaggatgaactcttcaaatagacttcattagacccacagaagactaacctttgcctgactttggattacccctttcttgccaggaattatgttcaatgactatatctggaactagaggtcttgatagccacactttgcttggtgtggcttctcagtcttttaaggacatggctatcaagggctcatgtttattccaggtcagccctttacccctttcctccaggggcatctatggcaacaaaagaccatgacatctggcagggctggcaggactatttagtttaggcaggaatgtgggtgttagcatgtcagagtacatctgagaaaacattccaaaccaacctttccacactgggaactcaacccccaggaatcaccaaagataagggcaacagtcttatctctcgagggaagttcagggtaaagtccactcctgctgtggaccagagctcagggaagaagaaagctcaggctggctctgcctgtccacttgatgaacttccacaaatgccactctgggagctgaggcatatgaagtggggaagaaaataccagccctgccctggagctctgggatggtggctgtacacccctaaagatgccagcagatctgaactgtggcctatgtgtgtttgggaattgagaaataaggagatagagggacagcaggcaggaaaaactacaattagtctcagctcacacagatttgggagtatgcagatctgaattgtggcctccatgtgtttggctgaaggataatgatctcaggcccagacttttttttttttttgtatcactcgctcagggggctctgaccaggagcttctttcagatgacacagatcccgaggagccacttgccttctacccatgacacttctaagagtgactcttgccatgtgaccatagagataagtgaagttttctccaatgacatcattaagaagtctaaacttccccaaagggagaggctgtgactaggaacacaaatgtctcagtgtatcacactcatgctcccagatctgtgggcagaaaaagaaatcatagaatggtgcatatcctaaaaataaaaaggaaattgcttttcaagttatgaaatttggcccttctcattgtgagtttaaagtacatgttactgcttcagtttctaaaacaggaggtggccaaattcagagtttaaaatgtctaagtggttatttgaaaacagatatttagaggcaactgagagaagaatactggggccatgggtctgcagtcactttcccagcagtgctctgaggccttgggtctcataaaaggtaatcatagttacgccttttaaagaaagctgagtctaactgtagcttttcctgcctgttgtccctctatctccttacttcccaattctatctatctttcaaaacccagctcaaatcccacctccttccataagtcttccattgtttaatatagttggaatttacctctccctcctctaactcccatggcattttatttacacctctctgatggccactttctactttctataaggtaagttatatacttgttttatatcaataaatttcaaaatattgaaatctta

SEQ ID NO: 809 - DNA, 5043 bp, Homo sapiens
cacagtgcgtcgggaacggactggagcaatccatcgcctctcacggggccccgccctcttgcttccgatttggaattcggaattagccttgcagacttctcttttctgtcctcatcgaaaagacagccagcttttgtaaccttgccttggggatgttagcaggagaaatgttggcaattcaaggctcttctggttttataagaaaaccagattttgctgggaggcctggagtagaagagagggtcttggagaagcaaacatgggaggagagacattcccagagatcaggaagaggagatatttggctatcggactcaaggctgccggaaaagtctctgccttgccggatccatcttctcatttggaatcctccccttggtgttttactggagaccagcatggcacgtatgggcacattgtgtcccatgttccttgcaagaagcagacactgtgttgctgaggacaacggatgaattccaaatttactcttggaaaaaggtaatatggatctacctgtcagcattaaacagcgcatttggtctcactcctgaccaccctctcatgacagatgaggagtatatcataaatagagccataagaaagccagacctaaaggtgagatgcatcaaagtgcagaaaataagatatgtttggaactacttagaaggacagttccagaaaattggttctttggaagactggcttagttctgccaagatacatcaaaaatttggatcaggcttgacaagagaagaacaggagattaggaggttaatatgtgggcctaatactatcgatgttgaagttacaccaatttggaaactgctcatcaaggaggttctaaatccattttatatatttcaactcttcagtgtctgtttgtggtttagtgaagactataaggaatatgcttttgccatcataatcatgtccataatttccatatctttgacagtatatgatctcagagagcaatctgtaaaactccaccatctcgtcgagtcacataatagcattacggtctctgtatgtgggagaaaagctggagttcaagagctggaatcacgcgtcctggtgcctggagatttattaattttgacagggaacaaagtgctaatgccatgtgatgccgttctgattgaaggcagctgtgtggtggatgaaggcatgctgacaggagaaagtattccagtcaccaaaactccgttacccaagatggatagctctgtgccctggaaaacacagagtgaagcggattacaagcggcatgtcctcttctgtggaacagaggttatccaggccaaggcagcttgctctgggaccgtgagagccgtggtactgcagactggattcaacactgcaaagggagaccttgtgagatccattctctaccctaagccagtgaattttcagttgtacagggatgccatcaggttcctcctgtgccttgtaggaacagccaccattgggatgatctatactctgtgtgtctatgtgcttagtggggaacctccagaggaggtggtgaggaaagcccttgacgtcatcacaattgcggttcctccggctctacctgctgctctgaccacaggcattatctatgcccagaggaggctgaagaagagaggcatcttctgcattagcccccagaggatcaacgtatgtggacagttaaaccttgtctgctttgacaagacaggcaccttaacaagggacggcttggacctctggggagtcgtgtcctgtgataggaatggctttcaggaagttcacagctttgcctcaggccaggctttgccatggggcccactgtgtgcagcgatggccagctgccactctctgatccttcttgatgggaccatccagggagaccctctggacctcaaaatgtttgaagccaccacctgggaaatggctttttctggggacgatttccacatcaagggagtgccggcacatgccatggtagttaagccctgcagaacagccagccaggtcccagtggaaggaattgcaatcctgcatcagttcccattctcatcggcactgcaaagaatgacagtcattgtccaagagatgggaggtgaccgactggcattcatgaaaggtgcaccagagagggtggccagcttttgccaacctgagacagtacccactagttttgttagcgaacttcagatttacacgacacagggcttccgagtcatagcactggcctacaagaagctggaaaatgaccatcacgctactaccttgacgagggagacggtagaatcagacctgatatttctggggctgctgatcttggagaatcgattgaaggaagagacaaaacctgtcttggaagagctcatctcagcccggataaggactgtaatgatcacaggtgacaatcttcagactgcaataacagtggccagaaaatctggaatggtttctgaaagccagaaagtcattctcattgaggcaaatgaaaccaccgggtcctcatcagcatctatatcttggacgttagtagaagagaagaaacacattatgtatgggaatcaggtactcctgaacacagaccttctgccacattatcaatgtgtcttgcagtgttggtgactgagcagctttgacctagagtcaacatatgcttccaaatgtctagcattcatgcttttgaacgaactcagttacattggtttttccatacttttcatacagagattgaaggtatagtgctttcctgtgtgctggaaataatccatcttttaaccttaaaaaagtggttgtccctatatgagaaagaatatagtgcgtggagttgaatctattttctccctttccccttgcttgtcaatcaccccactgggttctaaggggatctagtctttgggagagatgctgctctgtgtatcagaaaatcagactatgttttcagggtgagaaaaaagtttcattcatttatctccagtcttgtcagtattctatctctgttgtgtccttgtagaacaatattagttccctaaggacaaaaaaatagtaagttctcatttcagggagaaatttgttaagctgcagtgcttttgtattttacacttgatatgtgtgaaatgtgctcttctctgggactcaccaagatcaaatcacgatgaaaacaggacatgagtaagtgttattctcctattcactggttgtctgtgatgtgcaaagattgatccagcaaaaagaaaatgcttctctgaggaatcagagtgacttttacagatagatcctggtctgtcttcattaacttctctcagatatgcttatggttctaaccactctgtcaaatgaaagagtctaaaataactgtgtcttgctttgtaggacaattacattaacatcagggatgaagtctctgataaaggcagagaaggaagttaccattttgccctaactggaaaatcctttcatgttataagtcaacatttcagcagcctactgccaaagatattgatcaatgggaccatctttgcaagaatgtctcctgggcagaagtccagtctggtggaagaatttcagaaactggagtaggttctttgccagtgcaggtggcatgaactgcatggaggcataacagtcagggggagtggaagaggtaccaggagtcactcagtttgacaagggcagtggtccgtacttcggctgcatgagataatcacttgggagctttggagaaaatagcagtaccaagggatctcaccattcagagatcctgattcagttgtttatatggggcttaaaaaatcagtattttttttcacttaagtcaattttgcattcaatgctgagaaccactggactagaacctaagggtcctgaaagagtgtggggagaaataagaatggaaaggtggcttgagctcagctcctggagggacagtgagaatttatttgtatatgccgtcatcacaatgatgatatagggatattcatatgacaagagattcatgcaacattaaaaatactaaaatacttgtgtgccaaagcatttttccaccctaaatcagaaaaatcattctcttctaacacaaagggtctccattcctagacagaatgggcagtccaaatgaagtgcccatcgcttaggaccctttgtttcctgttaatagaaccccacagagtaccagaggctttctccatcttggtcatcgtgtcacaacaacatgactccgactcctacttgtttctgctctgccctcctattcatttgattccgttatcaggctagcttctcagctcagaaagccctatcttctcaacatggctgaaacctagagagtcaacgagttccctccatatggcagtgtggaagaaaagtatagcatgttttatgaatgctgtcagaatgctcataatttaaaaagttggctctcaatagtccttgtcaatgattcaagagagtattcacccagcctcaaaaagtcattctgaaacaaggatgtgttttctttcttcaacttctaggcctggcattacatacttgagttgagtgactgttgacaggatggatttcctctcatgctagtattaacagcacaaacaactatgacttgttatcattttagactttataagtactttcccatacagcacctcatttaatactcatagcccttcgtagcaaaataataataatgatgggaataataataatagtgaaaatgttaagatgaccaggtcaacatctgcatctggtttcaaatcctgtgccctctctgccatgccaaacttacatcatagaattgtgagcacctctgtcttacagctgagaaaactctccctacgcagtgatgtgcagtgtctacatgaaacacttacagtcaggaatcacgttctgaatttctaaatccattgtattaactgctgaatcacacttttttcagtcaaactagactcttaggaaaattcccttaaataatgagtttgaaccctaagtaatgatggttactttgtttttttaattagagaaattagcaagataggtttgatctcatctacaattaatgtggttccc

SEQ ID NO: 810 - DNA, 3481 bp, Homo sapiens
tacttagcatttttttttttttttacttagaccttttgaatttgcttttaatttatacccctggccttgttctcttgaccaaataaaagccctaagagagcttccactgccagcagccttccaatttgctctgttcccccttgggccctgttgattgggcccagtgatcacctaaaaagagtgcaaagagtcaggaaggcttgtgggttcagtctttctgtgctaacaccaggccacatccaggcctgatgtactaactgatctccagttcattccttttgcaatttttggccttgattcatagttcctgattcttgattggctctgaaatcctccccattttcaaaagggatgcagtcaagcaggccaaagcgctccatgttagctaacaaatgtttgcaaatcataataatgtaggaagagaaccataaactaaatgaacaacaggcattagccctcatgctgtcacataagcattcctcaaaatataatcatgcttctaaacatgggctggcaattcaggaaagggccactgaaaatattagcctcgttcttttctctgtagagtgagcacagactattcctaaaccacattgcagtatgccaacattgtaaattaatgcctgattggttacctagaagtaagacaatcttacttttaggcatctagaacactgagaaatccaggatggacacttaacactaccaaagattgatctattttgggtaagtatacttctgatctctttttgaggactgtattagtccattttcacactgctataaagaactgcctgaggctgggtaaattataaaggaaagaggtttcattgactcagagttctgcatggctggggaggcctcaggaaacttaacagttatggcagaaggcaagggagaagcaggtaccttctttacaaggcggcagaagagacagagagggcaggggaaactgccatttttaagctatcagatcttgtcagaactccgtcactatcacgagaagagcatgagggaaactgcccccatgacccaatcacctcccaccatcccccgctcaacacgtggggatgacaattcaagatggaattgtgtggggacacagagccaaaccatatcaagtacctacaaaattatggtgactcttcactaatttgcaaactgattatctgcaaatcttaaatagggaataaaacacaaaaatatcattatccctccagaactgaggacgcaaattggatttagaagacttagctttgacacctagatatgttttcattgatttgacctaacttgatctcagtttctcttttatagagttagttctttagatcagaggtccccaaccccaggactgcggactgccactggtctttggcctgtcaggcacccggccacacagctggagtgtgaaaaaaaaggaaaaaactgaaaatctcaagaggattccaggaaatcaaaacaatgaattattgaatcaagaatttgaaagagaaaatagatgcatactgaaaaaagaattttgtttagtgagatagatgtaataatgaaggcatgttgataacgggggagctatgtatatatgaggggagggatatattggaaatctctgtatcttcctctcaatcttgctgtgatcctaaaactgctctaaaaaatattttgagaaggaataatgatgtggtaaacatgttctgttatttaaaaagagagacttttcatagccgcctccctccccctctacacacacacagagtcctgtccgtcttcattcccttactcaataatttgtacagacacagccactgggctccagtaatcctaaagtttctagaaaatcaagcacagaaaaaggttaaaaccctgagggaataaaagaattcctttgcatccattgcatttctcaggaagtgaactaacaaattcactgcttttaaatgaggaaattttctcagtgaaattgattccaaaccttcgttaggtcaactgttcccagatttcttagctgatgcctgatctgactattccttatctttagtacagaaaccaaggtgaatgacctttaaaaaacatattagactgttgacgtgtcttctatgttgtactctaggtaaaaacgataaaccaggaaaaagaaagtaaaattcaaccttaggctcatggatccagagtggataattatgagtctgtagtatctacatgcatgtgatgaggttcaaggacaataaccataaagcaaagacttaaaaggttttatcattagaataattgtaattcacttgatctctcaatgtaacaatacttcggtctactgtctcaagccattattatgtcttacactcagcatattggtttgtctaccattaaatatttattttctacagtgctttctggaaggcaaacaaagcagccactctgctactttatattgattcctgagttgtccttcggaaacgctttcaggaagtttaataggtttgaaagatatttagacctgtgactggcaaatatacttccttctttttatttcaataagagagtactagaacttagatctttattgtttaatctagtcagtgctgtcattgtcaatcaagttctcaaatgacacttgtcctgagctgtaactgatctattcagaagaatatgaaaatagtaaagacggcaactatgcatgtttttaccggacacgattttaattgctttaaaatgaagttatgcaaccaatgaggaatggagcttttggagtggcctgaagctaaaggtttcaggtgtatttttgctttctttgaagaaagaaccaaatcattttatttaataaaaaggccatttatcaagaatttcttaaagctgttttaaacctgagtttgcaatttatagaatatgttcaagcagcctcagtgcccttttaattggatggttttcacagatttatccaatttgagatttatccagtgagaattccctttgttcaagtatatatgtcttctcttccataaagcagattcaaatgaaagagtgcaatctgatatatcagacatgtcagttatacatttgatgtggtaaatttataagagaggccaattattgttatgaaaaaatacaatgaaatacatgatagtcatttactgtttttataactaatctaaaagtatttactaaaaagaaactatttcttttcatatgtactttactttttactttaacccttcatatgtcctttaaataaagagaagaaaaaaagtcatttatatttatccacatattttctatttcaggtggtcctcattcattcttgtagatccaagttaccatctgttattattttctttgtcacctgaagaattttcagaactatttcttcctatatgtagcatgtatagatactctaaaaagtccattatatgatgtataaaacaaagcatacaatgtagtctctgccctaattatttgtaatttatataaaaccttttatttttta

SEQ ID NO: 811 - DNA, 3979 bp, Homo sapiens
cagctatgatcatgacactgcactccagcccaggtaatggagagagacactgtctctaaaaaaagtttaaagatgtaaaacgatatcaaagtacataatacaaaggacataacttaaaatgttgaaagtggtaacaagatttataaatgaaacagagtcacctgtaccactctctattcctactttgagggacaaacactttcaactgattcttttcctggtattttccttcacttttctgtgtccctggttctcaaagtggggtctctagaatttgggagaaatgcaaattcttagaccccaccccagatataccgaatcagactatgagggtggagcccagcagccaatgtttaaacaaacctgtctccagagattctgcctcacgaccccccaaagttctgactgttctgggtgaggtgtttatacaatgacttcctcctatggactgtgaaggcttacctttcttccaccctctccccagccccacaatcctgccttcttatcttttcagcacagctatatgaccaattttgatgatgttaaaattcagtgtttgttgtaattatgtaaatattttcacaactatcagtatatttcatgttttatgtaacttttattttccctggactgaataactgcctcatttttttgttgtcgtgatggcttagtgggtttgttgttgttgttttttagaaacgaagtctcagtatgttgcccaagctggtcttgaactcccggtcttaagcgatctccttgcctcagcctcccgagtacttctcagttttctatacaaatctctcatctatccctaacctctcagtggagaaactccaagatgaaccccaaagatctccatctccagctgttcacactcctatgtaatctctagcccttgggtgtggaaaggacttgtgacttactttaaccaacaacagaatatagcaaagatgcctaagaactgcaaatgagaaataattttctcacctggtcacagcatctaccaagaatggcgctgggggagagatcagtgagattccatctttattaccatgtccctccttccctgtcaaaagcatttcacatcccgcaagtccattagacatggcaccactctgctgtgggagatacacacacaactaaatacagggtaacaatacctgcctggtcagcacttcagctccaaatcaagcttcactaatgactatgagattaacgaagatggttttgataattatgactgtttgttttgtttttcttaactattcttcatctgagacttttacttttgtttctgccagcatcctgacaaacatttacaaccagaaagggtaagccactagcttgaagccattaagttaagttcagttaacaaggctttgataacaaccctcatgtttttaaggaaaaacaaagaacctagtaatcctttaggccttaccctgaaagggtagccagaagaaaaatcacaaataacatgaacttaccggaacaatccaccggggtgtgatcatggatgtggaagacacctgaaataattttatatgtatgtatttactttttggaaagactgacttattttcatacttataatacttacttacatctattatgaaatccattctaggagggcaattcttaattcttaatggtgttccttgagctgacatggacttctaaatccaagacccttttctgttatacaacacagatgctatccctcaccacttaagaaagtgtcataattttgagaatctcttatctaaaaatttaccattcaagaatctattactactttcagttcacttaataggactgcccctacctcacacccagtattcagtttaacattttattttctgaaatttcagttaattaattacaaataatgatagccttcttggtagcagcctgaacaatggattgtgactaatccaaataaagagcaacaagaaagtacacagaaaaataatctgtttagatacagatcattctctaattatcatgtatgcatgaagaaagcgcaataaaaacacccatattgctcctggttcacagggcctttgatacattatttttatatgtttaactttctattataggtcatctatgtgtagaattataaactaaggaaacccacccattttactagtaatttagactagtccttgcattggtggccttacatactcataagaaaaaactaatgtaagtccaggtattagtaaattagataaccaccaaaagaataaaaacacaggctgggcgcagtggcgcacgcctgtaaccccagcattttgagagggcgaggtgggcagatcatgaggtcaagagatcaagaccatcctggccaacatggtgaaaccctgcctctactaaaaatacaaaaattagctgggcatggtggcatgcgcctgtactcccagctactcgggaggccaaggcaggagaatcgcttggaggcggaggttgcagtgagctgagatcacgctactcctggcaaaaaagcaagactccatctcaaaaaaaaaaaacccacaaaatctgactttcctaccaatactttttagatgcatgttaacagcaggaaataagagagaaaaaatatcataaataatagtaaacaaaaaatagtttgacagacttttccacacttgcagttaattcttatccttggtaaagtctttgtttattaatctaagctggtcattcccaacgggtggttcccagaccacatctgcaccacctgggaacatgttagaaacacaacttttcagaccccacccaagatataccaaaattagaaacttggaggtggggcccagcaatcttgtgtgttaacgtcccctccaagggattctgatatacacaaaaatttgagaattaatgatctatgcaaacattcagtatcatgtgtatttccaagccttcaggatggcatctagcccctacagcaattctcgtcatatcactcataaggtacaaagttagtcatttctgtttttttttttttttttttttttttttgagacggagtctcactgtgtcgcccagactggagtgcaatggtgctatctcggctcactgcacgctccatctcccaggttccagcaattgtcttgcctcagcctcccgagtagctggcgctacaggtgtgcaccaccacccccggctaatttttgtattttcagtagagacagggtttcaccatgttggccaggctggtcttgaactcctgacctcaagtgatctgcccacctcggcctcccaaagtgctgggattacaggcgtgagccaccgtgtccagcaaagttagtcatttctatctctctcatccctggagggaaggaactgtttcagttggccctccatatccatgagttgtgcatctgtggattcaacaactgtaaatcgaaaatatttggagggaaaaaaaggatggttgtgtctgtactgaacatgtgcaggcttttattcttgtcattatttcctaaacaatacaatataacaactgtttaccagcatttacactgcattagatattagaggtaagctagattatttaaaatatactagaggatatgtgtaggttatatgcaaacactacaccattttatatgagatttaagcatgcatggattttggtatccaaggggagtcctggaaccaatcccccacagatactgagggacaactatacttaatacagtatcttccagactgtaataatgattgatatgttcaatgccattcttacgctctcatctttctataaaactttttaaaaaattaaatatatccttattgtctcaagaaactgctttatccccatgttttctctcatttaatatgatgttgaattataaaaggcttatagagacatgtgatttgtagacagtgatacacaaattcaaagtggtaaaattttaggacagagaggcaatgctaagtggttattaaaacataaactcttatcaaa

SEQ ID NO: 812 - DNA, 3299 bp, Homo sapiens
gtcagcccaggacgcggggtacagggacggggacgggggccggatcagcccaggactaggggtcaggattacttggggcctcatcagcccaggacaagggggtcaggtgacctggggccttgtcagccctggacagaggccaggacaaaggggttgggttcacctggggccttgtcagccctggacagaggttcaggtgacctgagcccctgtcaacccaggacacaggggtcagggtcagtctgggccctcatcagcccaggacacaggggttgggttcacctgggaccttgtcagtcctggatacagaactgggggttcctgggctggctgagggtttcctcaggccctgtcaccccccacacatagggttcattgtcccctgaattctcccagcccctgaatacggggtctggatctccacgttgtcagtgctctgaaatgggttttagggttcagcccttattacccctgagacccccagccctgtgggttctggacatgcccccacccccatccactggtaccagtgcccgggacacagggacacatggacagccctgtgcatctcttcgcattctttgaaccgggccacaccgtccatgcccacctcctcagacccagcatgtgggccggggtcctcctggcactgtcactgacacctgttcccagaggcccctgcacagccacatctcccatcccacagccactggtctctggcacccctcctctccctgtcacttccctgctgagccccgcccttccccacatcactctcagctcggtatctttgggtctgtcacaccctgggtctccactgctccccctgccttgattccatttctgggaaccacctcagcccatcccagggcaaccccaaccatgagccctgcctgtccagcgtgtgccccctgcccagatggcccctggctgcccgacaccctgtgtccttctcccagagaccacaggacctgggtgaccctgcctcccacagccctcacctccaggagtgactgtgggctctgggcccaggactggctgcttgttgcggttccttctcaaagggagccactgtccacaggtccaagtgcctgctgggcggctgttcccagaggcagcccctgcaggtgtgcagcaaaggggccgacacagagctcttgggtcaaggctggcacgtgctccttgcttacctggaggtcatcagagttgccccacgcccctggccttcgggcaggtggaggcattgggttcctctaaggtctttggttggggaagtttgggcccagaacacagcactctgtcctcaaagactatgacgtcacatgcaggttgcgtcacacgcaggtcgcggtgcactccatccttggaagtgttcctggccgtagccaggctgagggtgcctgcagacccaggcctgtccacaagatgtccccccacggacatgcctggccgctgctccagggagggtcagagggatgattggggcagagggatggatttgcccaaatgtggcagccaggccccatgcatttggcatggccagctccttcaggaaggcgggagagatggaacaaggtggtgactctccagggcagagcggcaaggccctaaggtgtggactccaggggaagcgggctcaccccaacgggccgagctccgcaggtgtggtgggcttttccctaaccccgggccctgttgtttgacatggaaacagctttctccctcagtcctgcatgttgagtgtccagaaccggatggtgacaccaggcagactgggtgctgtcataggccctccttccacagagttcatgcacccctgtgtgcaccaggcctggcgtggagtggagcccacttgagtggagggaggcagagcgtggcgacgcgcagggaagtgcctgtgactgagaaggcaccccctgcaggcccagagcctccatggtgacagttctgagcgcagcatgctgcccacgtgcagcacatccctgccctgtgggattgttagaaggctccagggaggatccttcctgccttttcccacttctggtggctccacgcactcccgggcttgtggctccagtttctgcctccgcctccgtgccgcactgttcctgcgtgtctgtgtctccatgtggtgatttcctcacagggacaccagtcattggattaggacttaacctgtgacatcttaacttgatgacatctgctaagaccctcagggggcgacacagttcaactaagaccctctttccatccgaggtcccattcacaggtactggggttaggacttcaccctgtcttctgggggcgatacccttcaacctacaacagcccttggtgagtgtccacaacgctaatgaggtgagagtggcatcccctcaagcgaacaactttccccaaattgcagccagatgtggcccagcaaagagccagggtgcagccatcagcaagcagagccccccagttctggagggtgtgtgccgagatgcttctggggaaaggcctgggcctggggctgggctgcagctgtgggacaagctgctgtctgggccaggagccactcagcgtcgccaagctgctgtccaagttaaaccaattcagcatctggcaccttgtttacaagcgtgatttgggggtttcttgctctccagctggcaagcagctggcagtggtcagctgaggccagagcctgggggcacatctcccatggcagcccagagggcaatggacaccccccactccgcccagccctgtgaccccatatggatgctttcgctgggtgaggctgcagcccccgcagggagtgctggacttgggcgcttttgctttacctgggacttgatgagatggggcacccgagaccagccacgcattccacagctgtgccccagggtccaggggatggggctgggggtggtcggacaaaaccactgcccacacttggagctgggggcagccgaacaacaccactgcccacgccttcctggcgagagacggttccagtctccccggtgctggcgtgggcacgccgtgggacagaagcgcagtcattcggcagaggctcccggctgttctcacattgtcagacccaccgtcaaggtcatttcaacggcccctttgcccggccgggcctcctgagttccctctgagcctcagagcagctcgtacacacagctttgggtttctaatggggatggggtcttcaggcctcagccccttctgggcatttcttccgttacaaaggaaaggaaatgtaccgaacactagaaacagtgtttaataaatagcagatttctcttcct

SEQ ID NO: 813 - DNA, 1934 bp, Homo sapiens
agaagtctgtccgcgagctgtcagcgcgggcgggaacgccgcggggcgcggggtgggcgcggccgacctggtccctgagccggccggcgaccccggacctcccgcgcgccccgcacccgaccggctcagccggccggcagcgtaacacgccctacgctcgcttgctcgccggcctcagggcaggcaggcgggcgcgggagaccccgccggggccgagacttggggcgggcgacgaggaccaggttacggcctcctcgccatgtcctcggcctgcgacgcgggcgaccactaccccctgcacctcctagtctggaaaaacgactaccggcagctcgagaaggagctgcagggccagaatgtggaggctgtggacccacgaggtcgaacattattgcatcttgctgtttccttgggacatttggaatctgctcgagtcttactccgacataaagcagatgtgacaaaagaaaatcgccagggatggacagttttacatgaggctgtgagcactggcgatcctgagatggtgtacacagttctccaacatcgagactaccacaacacatccatggcccttgagggagttcctgagctgctccaaaaaattctcgaggctccggatttctatgtgcagatgaaatgggaattcaccagctgggtgcccttggtttctagaatatgcccaaatgatgtctgtcgcatctggaaaagtggtgccaaactgcgcgtcgatatcacattgctgggatttgaaaacatgagctggataagagggaggcgtagttttatatttaagggagaagacaactgggcggagttaatggaagtcaaccatgatgacaaagtggtcaccaccgaacgcttcgacctttcccaagaaatggagcgcctcactctggacttgatgaagccaaaaagcagggaagttgagcggcggctcacaagccctgtcattaacaccagcctcgatactaaaaatattgcttttgaaagaactaaatccggattctggggctggaggacagataaagcagaagttgttaatggttacgaagcaaaggtttacacagtaaacaatgtgaatgtgatcaccaaaatacgcacagaacatctgaccgaggaggaaaaaaagagatataaagcagacaggaacccgctggaatctttgctgggaactgtggaacaccaatttggtgcacaagggcaggacctcaccacggaatgtgctactgcaaacaaccccacagccatcacgcctgatgagtacttcaatgaagagtttgatctgaaagacagggacattggaaggccgaaagagctgacgattagaacacagaagtttaaagcaatgttgtggatgtgtgaagagtttcccctctctctggtggagcaggtcattcccatcattgacctaatggctcgaacgagtgctcattttgcaagactgagagatttcatcaaattggaattcccacctggatttcctgtcaaaatagaaattcccttgtttcatgtcttaaatgcacggattacatttggaaatgttaatggctgtagcactgccgaagaatctgtatctcaaaatgtggaagggacccaggctgattcagcaacaaagttgggtgagatgtgttcatgaggttgtgcagctaaggaacactcgtgcactcttggctggaagaggagattggtatagttccttgaataaaacattcggcattactgtataaactgaagatgtggatgacctagcaattcctagatgtgtaccctaaagaaagttatgcacatgagcatctggagaccccagtactgggcagcagcatccattcataacagcagaaacctggaaacgacccaaatgtcccgagatgcttcccacatcacaaactttgaggttgatcaatctgtgtttgaaattcccgaatcttact

SEQ ID NO: 814 - DNA, 2152 bp, Homo sapiens
atcagaactcacacttcttcctggcaaagaagtgcccaggacgggagctggggagccagggctgatctaggaggctgggagccaggtgacaggatggccccaaagagagttgtgcagctgtccctgaagatgcctacccatgccgtgtgtgtggtgggagtcgaggcacatgtggacattcacagtgatgtgcccaagggtgccaacagcttcagggtctctggaagctccggggtggaggtcttcatggtctacaaccgcacacgtgtgaaagagcccataggcaaggcccgttggccgctagacactgatgcagacatggtcgtatctgtgggcacagccagtaaggaattaaaggacttcaaggtgagggtctcctactttggggagcaggaagaccaagctctgggccgcagcgtgctttacctcactggcgtcgatatttcccttgaggttgacacaggccgcacaggcaaggtgaagaggagccaaggggacaagaaaacctggcgctggggccctgagggctatggggctatcttgctggtgaactgtgaccgggacaatcacaggtccgcagagcctgacctcacccacagctggctgatgtcgctggctgacctgcaggacatgtccccaatgctgctgagctgcaatggccccgacaagctcttcgacagccacaagcttgtcttgaacgtgcccttttctgattccaaaagagtgagggtcttctgtgccaggggtgggaattctctctcggactacaaacaggtgctggggccccagtgtctgtcctatgaagttgagcgacagccaggggagcaggagatcaagttctatgtggaggggctgaccttccccgatgccgatttcctagggctggtttccctcagtgtcagcctggtggacccggggaccctgcccgaggtgaccctcttcacagacactgtgggcttccgcatggccccctggatcatgacgcccaacactcagcctcctgaggagctgtatgtgtgcagagtgatggacactcatggctccaatgagaaattcctggaggacatgtcttatctgacattgaaagccaactgcaagctgaccatctgccctcaagttgaaaatcgaaatgaccgctggatccaggacgagatggagtttggctacatcgaggcccctcacaaatccttccccgtggtctttgactcccccaggaacaggggcctgaaagatttcccctataagaggatcctgggtcctgactttggatatgttacccgggagatcccgctccctggtccctccagccttgactccttcggcaacctggacgtcagcccgcccgtcacggtgggcggcacggaataccccctgggccggatcctcatcgggagcagcttccccaagtccggtgggcggcagatggccagggcagtgcggaacttcctgaaggcacagcaggtgcaggcacccgtggagctctactcggactggctctctgtgggccatgtggacgagtttctgacctttgtgcctacctctgaccaaaagggcttccggctgctcctggctagccccagcgcttgcctcaaactcttccaagagaagaaagaagagggttatggggaggcagcccagtttgatgggttaaaacaccaggcaaaaagaagcattaatgagatgctggcagacagacacctccagagagacaatcttcatgcacagaaatgcattgactggaaccgtaatgtgctgaagcgggagctgggcctggcagagagtgacatcgtggacattccccagctcttcttcctgaaaaacttctacgcggaagccttcttcccagacatgatgccaatagcactctcccagatgtgacaaccaaaaatgccctagtggacaaaatggaccctgattgagaaccacggcttgaaggcagtgttgtctgttagaacattctgtgctgatgaaaatgttccatatcggtacaatacagtccagtagccactcagctaccacctgaaatgtggctagtgtcaatgaagaacagaaattgtaactttatgttaacatggtggtcttaggcaagtacctgggcatccccaagccctacgggcccatcatcaatggccgctgctgcctggaggagaag

SEQ ID NO: 815 - DNA, 5336 bp, Homo sapiens
cagcaatcctcccacctcagcctccttagtaggcgtggctacagtaatggaagacagcaaaagaagtttggagattcctggtttaaagcatttaaagcctctgtgaaaatttgcccaggccaacaacttcactttccacactcagtgccacgaagtgcagctctaagctggggatttctgtgcagagatgatccactgagtgcaacccaccaccgtgcggacaccacccctgcagaatcatctgtgaaaacaaccccaggcccagacataggggccagctaagcttcgtagccctcgaaatacagggagtgccccctctggaccctcgagcccacagtccatccaccacagaggtgtctgctgctcatcagatagttcctaccaagaaaatgctgtgtgaacccatctgtgtggcaaaccggcacggggagaaagctgacttccaaggacgtctaccaactgtcacttgcaaaccagaacttgcctctttgtagatgaagactggcagggctgaagaaatgatctcatgttgaaattaatgatgagcttcagggtgaggtgactcagttcgaatgctgttgaatgttggtgtcatgggacttttacaagaagtaaaactgggctataaaaatgatccccttcccctcactagagaagggaggttctattcctctctctgtctttccctctctctatatataccaaaggtcaaatctttggtattttgcattgagtctttaattattcattcactttgacctagtaattgcacttcagaaaaataaaggaaaaactcggggcataagtggtggttatggggggcaggggaagcgggcatgtggttgtttttctcttttatttttaaattttttgctttttctgcatttctcaggtttgccctaatgagatgcctgactttaataagagaagaaaccatcagtgtttgcaaagccccctcagtgtgcctcacactccctcttcaggcacagcaggcatcttctctgagtgccagggccccggtgaccacacacccacatacacggaccacccactcaacccctcagggaacactgccacccccacttgctacatcaactgccttttcaccttgtttagaagcaaaagtcaactcaggggccaggagaccctgggcatggggctaggtctgggcaaggtctcgagtcagggagagaggggcaaggagccatgtgcctggagtgaggctgtgtccctgccctgggcaagtcagggtggctggaacctgcccttctggagtgggcccctcgaacttgttagagtacttataacctcctgtctgcacccagaaaacccgcccaggaagcatttcatgtggtgaagagagattccaaactggaacttggaggctcgttcccagcccctctctgacgccgatttcttgagttgattttgcctgtgcattgagcagttggggctacataaggtttacaggattctaaaaaattatcatgacatatgtcaggcataccaaaagtgtaatgagtcatagaataaacacctaggcacacccctactcagctgaagaagtaaaacagtatcaaggtagtggaaatccctcctgcatccctcttccccctccccagtctcccacaacccttccccaccccactcgcagtggggagaagcatggccctcagctctctttatgcgctcacttcttatatctccctaaacaatatatgaaacaattttccataagcgtcacttgaatacaagcagtctaatattgtatatacttgcctgtaacttgcttttgtttttacttttcctcttgaaataatgttgaattcacagaagagttgcacagatgccaagttccctgacactcttcaccagcttcccctagtctgaacatcttatataaccacagtccattgatcaaaactaagacatttacattggtgcatccccatcaactaagtcacactttggctcaaattccaccagtgtttccactcatgtcctttttgtgttccaggatcctgggacttcaggacaccacgttgtatgtagctgtatgcctccttagtctcaatgtcatgttagtgatatctgatgtgtgtgctcatcttcactgttccacggtattttattgtgtgaaaacagcacaatttatccatccactctcctattgatggacatttaggctgttttcaaatttgccattaaaaatgctgcagtggacttccttgtgcacatcttcttatgagcgcttagggctggggttaggagcggaattgcaggctcacagggaagggccagagtcggcttcactaggaagcaaagttgctttccaaagtcccttggccaatttactctggcaaagtctgagttcccatttctctatgttcctgcagcacttgctaatgtcagacttccaaatttctgtaaatcttgggggagcaggatgtgaaatgacatgacttgtttgaatttgcatttccctgttaggttgaacagtttctcaatggttatttgtcatccaagctttgtctctaaatttcctcttctgttaaggtttccccccatttttctataggatgattttttttcacaatttaagtgtttgtgtgtgtatgtgatactaataattcattatcactgtagacatgaagatgtgcctctgacatttcccttaaggaaaggacttgctaattgagttaaggagcttgagaggaagggatcatcctggattatctgggtaggccccaaatccaatgatggtgtccttattaacagaggggcagagggaggtttgagacagacatgcagagtagagaggtggacagaacagaataggcagagaggagaaggtcaagtgaggcggaagtagacatcaatggcctgtctcctccctggccaaagctgactgggcaagagaaggacccatgagctgagccaacccctgtggctgaccagtggcctggcaggcattgcccattgaggaaaggtgctttcacaggaaggctgcagtacattggggtggggtgcccatgctgggccatgtgtgggacaaggagaaacagaagaatctagtcttggagaaatggtggccgtggtgatgtggagagagaagcagggatgaaggagacctgggaagccctggcatttccagatgccctgaaattgaattggtaagtttttaaaaatcccttctatttatttatttatttatttatttatttatttatgagaaagggtctagctctgtgacccaggccggaggacagtggcatgatcatagctcactgcagcctcgaactgagcaccagctgctttcagctcctgtccacagtgagctgttgcaagagtttcctggggctgctggagcaaagtaccccaaactgggtggcttcgagaagacagacttattctcccagttctagaggctgaaagtctgggacgaggtgtttgcagggcaatgctatccccagacgctctggggaagcatgcttcctcacttctccctggctcctgacagtttcctgtgggtctttgaggttccctggctggtcgaggtctcactcctgccccggttttcatgtggccaccttccctccatgcttgtctgtccctgtgtctgaatttcccctttgtgtgacaccaggcttcttgggttaggacccagactcatgacttcatttcaactccattccctctataaataccctgtctctaaatgaggccacatctacggtactaggggtcaggcatgaacgtatctttttaggaaaaatcaattcattcccaatacctgagaactcgtcttttgcatccttgtaatagtattccccttttatttgaggagtgagagtgggtttccttgcttgtaaccggtgggtctccaccacagtggtttgtgggtgctcacttccatgtgagtgaggagccggggggccctggggtgtgctcccacgggctgtgtctgtccgcaccgcacaacaggtgacggccaaagctgtgggcagaaagtagagaactggatgcaagtgtttgccaggttggcctcggaatgttagatcagcctctggccccccaaacctccaggaaaagaagcagtggtggggttcagcctgaaccctaaacaacctccatgactggtcccgttcttattccattttgtgggtagagactggactggtgtttgaaggtttctcacattattttccgtgtctatgcctccacagtttcctgcggctgtctgcacacccagaccagagcagttcctgcctttgcgctttgcaccattttccttggtgaacttctattcatccttcaaagcccagcagtaatcatcctttagaaagtcttctttcagagggaaccaaaaaggtaatcgctggagacagacagatgctgcctgaatgcctgttgtgttgtgtggttgtgggaatgttacttcacctctccgtgcctcagtttcctcagctgtaatggggatggtaacagtgtctaggggtactgcttggaatgcacatagggagatgagtgaaggcccagcactagaagagtgcaggcactagcagagtgcaggcgcaattgctgctgggaccagcaggtaactcgcatccaagttacagtgcccagccccagcagcagcctcagcaccaggcagagtgtgctcagcactgtggggggccaagaggacttgagggccgctggtctgtgattctctcatctcttttgaggttcaggacttggcgtctctcctagaagctctggggaacctgacaaatcctccaggaggacacagaacgcaggaagggctggctcggggtgcaccaagatggctgccccgagacaccgtatctgagggcttgggtggaactgaggagagggcggctgggaaggccatccgggaggaaagggcagacggctacggcagcgtcaggtggtacagtttgccccggaagtgaggtaaagaagagagcgggaggagagagggccacatgcctctcagccatggccctgaatgctggcttggctgagcctcatctttgctgtttgcagaatggggagaattgtgcctgcccagcctcctccttggggactccaggggcccaaagaaccaagagctgcaaatgtcctggtggccttggaagtttatggatggtacagatctggggtggagggcatggccaggacagggagggctgtcagagagagggtctgtgggtttgtggagtgtggggatcagtcgctgactcattagatgaaccaggagcctgcatgctacagcccacctgccaaatcttgcccccacctgctttttaaaataaagttttattggaacatgg

SEQ ID NO: 816 - DNA, 10065 bp, Homo sapiens
agttttgcaatcaattcctgttcaaaggccaccctactcttcctatccgtctttctccagcccagacactcacagccccctgccagaccaggggacctcggagaggcaaggacagaggttcaggatcttcctctccctcgggacccaaggccacaaaggagagctccgtggagagaagaaaatcatttgactcctggggacacagatttgctgccacagaggctgatggacaaccaggcggagagagaaagtgaggctggtgttggtttgcaaagggatgaggatgacgctcctctgtgtgaagacgtggagctacaagacggagatctgtcccccgaagaaaaaatatttttgagagaatttcccagattgaaagaagatctgaaagggaacattgacaagctccgtgccctcgcagacgatattgacaaaacccacaagaaattcaccaaggctaacatggtggccacctctactgctgtcatctctggagtgatgagcctcctgggtttagcccttgccccagcaacaggaggaggaagcctgctgctctccaccgctggtcaaggtttggcaacagcagctggggtcaccagcatcgtgagtggtacgttggaacgctccaaaaataaagaagcccaagcacgggcggaagacatactgcccacctacgaccaagaggacagggaggatgaggaagagaaggcagactatgtcacagctgctggaaagattatctataatcttagaaacaccttgaagtatgccaagaaaaacgtccgtgcattttggaaactcagagccaacccacgcttggccaatgctaccaagcgtcttctgaccactggccaagtctcctcccggagccgcgtgcaggtgcaaaaggcctttgcgggaacaacactggcgatgaccaaaaatgctcgcgtgctgggaggtgtgatgtccgccttctcccttggctatgacttggccactctctcaaaggaatggaagcacctgaaggaaggagcaaggacaaagtttgcggaagagttgagagccaaggccttggagctggagaggaaactcacagaactcacccagctctacaagagcttgcagcagaaagtgaggtcaagggccagaggggtggggaaggatttaactgggacctgcgaaaccgaggcttactggaaggagttaagggagcatgtgtggatgtggctgtggctgtgtgtgtgtctgtgtgtctgtgtgtatgtacagtttacatgaatgttcctcaggacatggcatacaatggccttggaggtccaaataatatcaagtacatcttggagatgagggtgcctgtcctggacagacctcggcatgccttctgtttctccttcaatgctccttaaggcctatgtgctgggaaaagggtcttccctgtttgtttgtttgtttgtttgtttgtttgttttgagacagggtctctgttgcccaggctggagtgcagtggcgtaatctcggctcactgcaacctctgcctcctgagtgcaagcaagtctcctgcctcagcctcccaagtagctgggattacaggcacgcaccaccacgcccagctaattttggtatttttttgtagagacagggtttcaccattttggccaggctggtctcgaattcctgacctcaagtgatccacccaccttggcctcccaaaatgctgggattacaagcgtgagctaccctgcccagccgggtcttcccagttttaacaaagaggtcacagagccacaggcggagttaggaactaaattgtctcctcctcccaattcatatgttgaagtcctaaaccaaaatgtggctgtatttagagatggaccctttgggaggtaattagggttgactgaggccatagggtgaggtcctaacccgatggaattgacttctttataagaggaggaggaaatacaagagggcctccccacccctgctgcacacctacactgaaggaaggctatttgcagatgcagcaagaaggcagccatctgcaaggcagaagaagagagccctcaccaggaactgaataagtcagtcagtctgggacttccagcctctagaactgtgaaacaataaatttctgtggtgtaagcaactcaatctatagtagtttgttactattttgttatagcaaccaaagatgactaagccagacaggttatgtcactcgccaagtgtcttagtctgtttgtgctgctataacaaaataccttagactgggtaatttacaaacaacagagatgtatccagagatccacagttctggaggctgagaagtctaaaatcaaggcaccagcagattccacatctcgtgaaggctcactctctgcttcacagatggcactgtcttgctgtgttctcacatggcagaaggggcaaacaagcccccctgggcctcttttataaaggcactaactctatgcctaaaggcagggccctcatgactctatcacctaccaaaaggctccacttctttatactattggaggggtagaaggaacttcctttctagaccttgaaggtttaagaatttgaatctataaaacaagctgacaatagacagattaacaggagaaaaagcatatacattttttaatgtgggccagatggcagaagcttaaataacaccccaagctacaggaagtgaggcctctgatggggaggtagtgacacaggctgtgggagggggtagggggaggaagtctgtggtgagcaaagtttgccttattacactgataaagtgtaattacactaataaagctggatcacctgaggttaggagtttgagaacagcctggccaacatggcaaaaccctgtctctactataaatacaaaaattagccaggtgtagtggcagggcacttgtaatcctatctactcgggaggctgaggcaggagaatcgcttgaacccaggctgtaaaggttgcagtgagccaagatcatgccactgcactccagtctgggtgtcagaatgagaccccatctcaaaaaaaaaaaaaaaaaaaaaaaagaagaagaatacagtcatgtatctcttggtgacagggacgcattctgataaatgtgtcattaggcaattgcattgtagtgtgattatcacagattgtacttatacaaaacttagatggcatagcctactgcatacctaggctatatgggagagcctattgctcccaggctacgcacctgtacagcatgtgactactgaatactataggcaattgcagcacaatgggaaatatttgtgtatctaaacatatgtaaacagagaaaaaggaaagtaaaaatatggcataaaagataagaattggctctcctgtacagggcacttactacgaatggagcttgcagggctgagagttgctccagatgagtcagtgagtggtgaatgaatgtgaaggcctagggcattactgtatactactgtaggctttataaacacagcacacttagggtacacaaaatgcatattaaaacattttcttccttcagtatattaggcaataggaatttttcaagtccactataaatcttatcaaaccatggttgtatatgcagttgaccgaaacattgttattggacacataactatagttgaaagaataagcaaaaagtctatctaggtgtgctgtcttgagcaacttttaattattctcctgtcctgcaatatgagttaatcttctctgatcgatgtagattccaggaaggggtgtccaggacaattaccttccttctggagaaacttcccttaatcaaataagagaacttcaaagaaaatccctccctgtgctttggaagggaagggaggtgggcagcagtgggtcagagatagacctttgttctcttatttctgaggcccttcagtctcctttattcaaagcactcagcatgccaaagcaccctattttagggtatctttttctgagccctaaacactgtgttggggatgtcaactgtgacaggaaaatatcttggggccccagaatcactaaggaaaactcaagcttagggaaacttcttagggcaaacccacctcccactctattcaaagttatctctctgctcactgagatagatacatatctgattgcctcctttggaaaggctaatcagaaactcaaaagaatgcaactgtttgtgtctcacctatctgtgacctggaagctccctccccactgaaccaatgttcttcttacatatattgattaatgtcttatgtctccctaaaatgtataaaaccaaggtatgccccaaccatcttggccacatgtcatcaggacttcctgagtctgtgtcacagtgtgtcctcaaccttggcaaaataaactttctaaattaactgagacctgtctcggattttctgggttcacattttggaaaccatgaatggattctgggtggagatgcccctgacccttgacaaatctatcggtgcttggtaccagcatgagctaactttatggctcaaaccaataggacaatttgctgaggtctgagaggactccctccagaaaatccctgatctcttaaaatttggtagagatcggaagtttattttgctgtacaacacctctttttttggagttttacttgctcccaacaaggaaggcaagttttcctgctttcatgatgatggaaggcaggtgatgtttttatggagtttcagctttcttccaatgcacttagagcactcagaaattgtataatttgtgtgaccattgttagttttgcttaactgttttgttgtttgtttctgtcttagtcaaatctgaaggggaaccctaaattacggggtcaaggactctgaagtggtaggaaaacagccagcttaaaaaactttttttaaattttaattactataggggctttatttacataacacagccagctttttgctagccagaccaaactcaaagagcaatggctgtacttctgaaatagcaacactttgtcctagctgagatttggtaataagattttttttttaagtttttaaagaagctcagtggttgaaagtctgcttaactgaaacagtaacatccatgatgtgtgttttgtgcatgtttgtatttgaaaggccttcatgtttttgtttcttgtttgtttttctctcctaagaccttgtcttttttttgtagcaaaagttttttttttttttttccttttacttctcagttgactgaattctgttttcaccggattttttgactaaaatagctattgcaacagaggctactcttgggttaaggaagaatgtagtttcgttttatgtttaatatcgctcaaagaaaaataaaagcatctccctctaacaccaccagacttttcctctctgtaccttatcatgtaaattttgctatttgattttcacctgggttgtttcctttaatgtgcaaaaatttaaggctatttagctgacaactgcctagggttgtaaaacaggttatcaagaatctgaaagtctaagataggaaaaaaaagtgggggggcattataaatctataaaatgtacttctattggcatgcctaatacgtctttatatgtatgtatgtgttgtgtacacgatgttttagtgctaaaaatatgtaaaagagctctacttggcttaaagaaaaataaaagtgcttaaatcagatactaaaaaagaaaaggctagtcaaatgctttttcaaatttatgtaacttaagtaaaatctttaataaataaagtagctttaaaattattggtaaagtagtattagaaatgtcttaagaattgccagcatacatttttgtttgcattatattaatcaaacagttttatacttatccctgccaaataccagaaggtgtcaaaatttggcataggggttataaaactataaacccagcccaaaacagaatgatctttgcttgtgtaatttttaataaataagacattgatatgggtttaatgaaaacagctgcatcttgaatttagtaagattaccataacttctaatcctgtggctttaggcagtttagtccacagacaataaggaggtttgttttgggaaaggactgttattgtcattgtttcgaagctgaacttaaactaggttcctcccaaagttcattcggcctatgcccaggaatgaacaaggacagcttggaagttaagagcaaggtggagtcagttaggtcaaatcgtttttcactgtctcagttgtaattttgcaatggaagtttcataactttaaatcatgactatcacagtttttataaataatctaggtaaacaattaataaaataactaggtaaatgtaatgggataaatacttatagaccaactggacataatttagaatataaagtcatattaaattaaataatagataatttattatttgggtattttccaataaatatatcttgtaggaaaacattgttgcttaaaaaaaagtgtgtccttttttaaaaaaatggtgaacaagttttgtctaattcaaagcttattaaaaggttatatataaaacaaggtaaaaggaaccagaaaagaaaaaaaatgtaaataaagttataaaaataaagaattttttcaaggttaaaaagctgaaaaagaaataattttatataagaaagaattttatatggtaaatttagtcctaaaataaaataactggttgtttaacaaggagggatgttcaggacaaaccagaaagtccaagcatgtcatgaacattggtgtaagtcatgataagattttatatatatatatacacacacacacacacaccccaaaagcttttatataatcaagttgtcatattattattaagttttggtttgcttagggaagaaagagctaatttttaaaaaatcaaggttattacatccatgtatcttcctgtgtatgcttttaaagtccttgtaacattgagttacagggctttaactcctgtgtctgaaaaatcacaaacactgatgacaatcaaagcctcatcttaaggccccgtagaagatgccaatcaaaataaactgcattcctgaggcactaggcaagaaattaaagctattcaactcctcaaggcccagggactattgcggaagaggtgggcgcgtaagattgtaagggccgattttgaaagatccagtaagttcagtttctctatgaactaatcattcaagtcaaaggcacactgatgcaaaatcagtatatggacccctgtgtctgattagcaaggttttcttgaagcattaaccaactccttcataaaggttataaaaggcttatggaagttatattttataatcaagattaaatcttatagtttgtttacaaaattttgaaaatcaaatgtgattggcttcaggctgtttttattagggcttcttgtttagaaagttaagtcacctctctcaaagaatgaaggtttttgctttttttgaaatccttgaattatcacttggattaaataaatgactttacgatgacctgtaattttattttgtaatgtcaagtgttttaaaccttttgtatttgacaagctttccaaaatcaaattataaattatgtatttttctaacctaattaatcctttaagatcttagtttccctaaagtcctaaaatgacataatttggcttatttggtataaaaattatataggaagcattgtcaaatgtgaaatggtgtttggttttctttgggctgtatttgtataaatatgttattggtgtatgttccaaaattatgtgaaactcctataattctaatataacttagtgtacattatcagtaataatcataattgttatattaaaattattgtgtgccacagaggtaaaaaatttccttgtcagttttgtcttttgactatggctgccttaaaacttttttcttccatgcacaattgttgttttggtcctcttttttaaatatatttttattattatttttgagatggggactcactctgttgcccaggctggagtgcagcggcacgatcttggctcactgcaactgccacctcccaggttcaagcggttctcctgcctcagcctcccgagtagctgggattacaggcatacaccaccatgcccagctaatttttttgtattttcagtagagatggggtttcaccatgttggccaggctggtcttgaactcctgacctcaggtgatcagcccaccttggcctctcaaagtgctgaaattacagatgtgagccacacacctggcctattttggtcctctttagaaggtggttttataatcagctgtaaaactccaacaggtgctcttacatgcaggtttctgataactttggagattgtgacatcagaatagagggaaaagtttcaggactcatggagagctaaaatgttcatgagtatcaagcagaacaggaattaactgcatagactgaaccaatctttttgactttttgcttaaaatgtttgctgatcctttgttttgtgtttcagtcttaaaacttttcttttgagctattgacagcttttaacaatttagtatactcctatgacaaaatttggagcatatttgtttctctctacctgatttctccagaattcagaaactatttgtaagtattcttaacttatggtgatacagttatttgcataagtgcaataagaatctgttctaatttgtaacaggacacgattggagaaattggttgttttactaagactttgactggaatggtgtgcttttctttaaggaatcaaacttgacttatggaaccaataaagtccttggaaaaactggccccatattttgtgtacacagtctccgtacaagatttctgacctgtagtaagtaaagaatgtcactttctgacaggcacataagccccaggtttacctcagaacctcaagaggagaggaaattcacccaatttataagtatttgatggcacaaatccatggctgggcatggctttaagaaagtcttatctgagattcctcctgtggaacaaagttaattggttccagagattcaaagccagagttgctgtcagttcattggtagagatgccatcactgggcaagtgttctgaaaacatcttatctgaataacagcagtcctggagaacatctagggatctagcaaagcgagagatacatgaaggacataaaaacgtttttagaaagtccttggaaacagttctcatttcagacatgtaagcatgagctaggatgaaaagtgatttcatcctggtatctgcaattttcacattcattaggtttcaacatataaactttcaggggacacagacattcagactatagcaccaagctgtagaagctacatagttgtagaccagggtcagcaacccaagaagcctgacttccaagctgtgcttttaacttccccaccatgttgcacctaaagctttggagttttcctgtgattagtgtttttggtgttgttttattttttttcttacaggaactcttgcaagaagaaaggactatgagttcaactttagagggagccatggggactaaacaaaattctgaggccccctcaaccatctaaatggacttccttctgggccaggacactcgaaaattaaacctgaaagactggttcaggccatgatgggaagtgggagtcgaacatgcctcatcataccctccagcattaacatcaacacagaccttaaggctgataagaagcatttacaatctattctctctgaagtcttctacctggaggcttcatctgcatgataaaactttggtctccacaacctcttacaacccaggcattcctttctatcgataattactctttcaaccaattgccaatcagaaaattgttatatctacctataatctagaagcccccacatcaagttgttttgcctttctggacaggaccaatgtatatcttaaatgtatttgattgatctctcatgtctccctaaaatgtataaaaccacgctgttccccgaccacctggagcacatgttctcagggtctcctgagggctgtgtcacaggccatgttcacttacatttggctcagaataaatctcttcaaata

SEQ ID NO: 817 - DNA, 1447 bp, Homo sapiens
gtcactgagggttgactgactggagagctcaagtgcagcaaagagaagtgtcagagcatgagcgccaagtccagaaccatagggattattggagctcctttctcaaagggacagccacgaggaggggtggaagaaggccctacagtattgagaaaggctggtctgcttgagaaacttaaagaacaagagtgtgatgtgaaggattatggggacctgccctttgctgacatccctaatgacagtccctttcaaattgtgaagaatccaaggtctgtgggaaaagcaagcgagcagctggctggcaaggtggcagaagtcaagaagaacggaagaatcagcctggtgctgggcggagaccacagtttggcaattggaagcatctctggccatgccagggtccaccctgatcttggagtcatctgggtggatgctcacactgatatcaacactccactgacaaccacaagtggaaacttgcatggacaacctgtatctttcctcctgaaggaactaaaaggaaagattcccgatgtgccaggattctcctgggtgactccctgtatatctgccaaggatattgtgtatattggcttgagagacgtggaccctggggaacactacattttgaaaactctaggcattaaatacttttcaatgactgaagtggacagactaggaattggcaaggtgatggaagaaacactcagctatctactaggaagaaagaaaaggccaattcatctaagttttgatgttgacggactggacccatctttcacaccagctactggcacaccagtcgtgggaggtctgacatacagagaaggtctctacatcacagaagaaatctacaaaacagggctactctcaggattagatataatggaagtgaacccatccctggggaagacaccagaagaagtaactcgaacagtgaacacagcagttgcaataaccttggcttgtttcggacttgctcgggagggtaatcacaagcctattgactaccttaacccacctaagtaaatgtggaaacatccgatataaatctcatagttaatggcataattagaaagctaatcattttcttaagcatagagttatccttctaaagacttgttctttcagaaaaatgtttttccaattagtataaactctacaaattccctcttggtgtaaaattcaagatgtggaaattctaacttttttgaaatttaaaagcttatattttctaacttggcaaaagacttatccttagaaagagaagtgtacattgatttccaattaaaaatttgctggcattaaaaataagcacacttacataagcccccatacatagagtgggactcttggaatcaggagacaaagctaccacatgtggaaaggtactatgtgtccatgtcattcaaaaaatgtgattttttataataaactctttataacaaga

SEQ ID NO: 818 - DNA, 913 bp, Homo sapiens
aaagcgagcgacatgtccctttggggagcagtccctctgcaccccagagtgaggaggacgcaggggtcagaggtggctacagggcaggcagaggaggcacctgtagggggtggtgggctggtggcccaggagaagtcaggaagggagcccagctggtgacaagagagcccagaggtgcctggggctgagtgtgagagcccggaagatttcagccatgcctcacagctccgacagcagtgactccagcttcagccgctctcctccccctggcaaacaggactcatctgatgatgtgagaagagttcagaggagggagaaaaatcgtattgccgcccagaagagccgacagaggcagacacagaaggccgacaccctgcacctggagagcgaagacctggagaaacagaacgcggctctacgcaaggagatcaagcagctcacagaggaactgaagtacttcacgtcggtgctgaacagccacgagcccctgtgctcggtgctggccgccagcacgccctcgccccccgaggtggtgtacagcgcccacgcattccaccaacctcatgtcagctccccgcgcttccagccctgagcttccgatgcggggagagcagagcctcgggaggggcacacagactgtggcagagctgcgcccatcccgcagaggcccctgtccacctggagacccggagacagaggcctggacaaggagtgaacacgggaactgtcacgactggaagggcgtgaggcctcccagcagtgccgcagcgtttcgaggggcgtgtgctggaccccaccactgtgggttgcaggcccaatgcagaagagtattaagaaagatgctcaagtcccatggcacagagcaaggcgggcagggaacggttatttttctaaataaatgctttaaaagaaa

SEQ ID NO: 819 - DNA, 4071 bp, Homo sapiens
agaattcttagttgttttctttagaagaacatttctagggaataatacaagaagatttaggaatcattgaagttataaatctttggaatgagcaaactcagaatggtgctacttgaagactctggatctgctgacttcagaagacattttgtcaacttgagtcccttcaccattactgtggtcttacttctcagtgcctgttttgtcaccagttctcttggaggaacagacaaggagctgaggctagtggatggtgaaaacaagtgtagcgggagagtggaagtgaaagtccaggaggagtggggaacggtgtgtaataatggctggagcatggaagcggtctctgtgatttgtaaccagctgggatgtccaactgctatcaaagcccctggatgggctaattccagtgcaggttctggacgcatttggatggatcatgtttcttgtcgtgggaatgagtcagctctttgggattgcaaacatgatggatggggaaagcatagtaactgtactcaccaacaagatgctggagtgacctgctcagatggatccaatttggaaatgaggctgacgcgtggagggaatatgtgttctggaagaatagagatcaaattccaaggacggtggggaacagtgtgtgatgataacttcaacatagatcatgcatctgtcatttgtagacaacttgaatgtggaagtgctgtcagtttctctggttcatctaattttggagaaggctctggaccaatctggtttgatgatcttatatgcaacggaaatgagtcagctctctggaactgcaaacatcaaggatggggaaagcataactgtgatcatgctgaggatgctggagtgatttgctcaaagggagcagatctgagcctgagactggtagatggagtcactgaatgttcaggaagattagaagtgagattccaaggagaatgggggacaatatgtgatgacggctgggacagttacgatgctgctgtggcatgcaagcaactgggatgtccaactgccgtcacagccattggtcgagttaacgccagtaagggatttggacacatctggcttgacagcgtttcttgccagggacatgaacctgctatctggcaatgtaaacaccatgaatggggaaagcattattgcaatcacaatgaagatgctggcgtgacatgttctgatggatcagatctggagctaagacttagaggtggaggcagccgctgtgctgggacagttgaggtggagattcagagactgttagggaaggtgtgtgacagaggctggggactgaaagaagctgatgtggtttgcaggcagctgggatgtggatctgcactcaaaacatcttatcaagtgtactccaaaatccaggcaacaaacacatggctgtttctaagtagctgtaacggaaatgaaacttctctttgggactgcaagaactggcaatggggtggacttacctgtgatcactatgaagaagccaaaattacctgctcagcccacagggaacccagactggttggaggggacattccctgttctggacgtgttgaagtgaagcatggtgacacgtggggctccatctgtgattcggacttctctctggaagctgccagcgttctatgcagggaattacagtgtggcacagttgtctctatcctggggggagctcactttggagagggaaatggacagatctgggctgaagaattccagtgtgagggacatgagtcccatctttcactctgcccagtagcaccccgcccagaaggaacttgtagccacagcagggatgttggagtagtctgctcaagatacacagaaattcgcttggtgaatggcaagaccccgtgtgagggcagagtggagctcaaaacgcttggtgcctggggatccctctgtaactctcactgggacatagaagatgcccatgttctttgccagcagcttaaatgtggagttgccctttctaccccaggaggagcacgttttggaaaaggaaatggtcagatctggaggcatatgtttcactgcactgggactgagcagcacatgggagattgtcctgtaactgctctaggtgcttcattatgtccttcagagcaagtggcctctgtaatctgctcaggaaaccagtcccaaacactgtcctcgtgcaattcatcgtctttgggcccaacaaggcctaccattccagaagaaagtgctgtggcctgcatagagagtggtcaacttcgcctggtaaatggaggaggtcgctgtgctgggagagtagagatctatcatgagggctcctggggcaccatctgtgatgacagctgggacctgagtgatgcccacgtggtttgcagacagctgggctgtggagaggccattaatgccactggttctgctcattttggggaaggaacagggcccatctggctggatgagatgaaatgcaatggaaaagaatcccgcatttggcagtgccattcacacggctgggggcagcaaaattgcaggcacaaggaggatgcgggagttatctgctcagaattcatgtctctgagactgaccagtgaagccagcagagaggcctgtgcagggcgtctggaagttttttacaatggagcttggggcactgttggcaagagtagcatgtctgaaaccactgtgggtgtggtgtgcaggcagctgggctgtgcagacaaagggaaaatcaaccctgcatctttagacaaggccatgtccattcccatgtgggtggacaatgttcagtgtccaaaaggacctgacacgctgtggcagtgcccatcatctccatgggagaagagactggccagcccctcggaggagacctggatcacatgtgacaacaagataagacttcaggaaggacccacttcctgttctggacgtgtggagatctggcatggaggttcctgggggacagtgtgtgatgactcttgggacttggacgatgctcaggtggtgtgtcaacaacttggctgtggtccagctttgaaagcattcaaagaagcagagtttggtcaggggactggaccgatatggctcaatgaagtgaagtgcaaagggaatgagtcttccttgtgggattgtcctgccagacgctggggccatagtgagtgtgggcacaaggaagacgctgcagtgaattgcacagatatttcagtgcagaaaaccccacaaaaagccacaacaggtcgctcatcccgtcagtcatcctttattgcagtcgggatccttggggttgttctgttggccattttcgtcgcattattcttcttgactaaaaagcgaagacagagacagcggcttgcagtttcctcaagaggagagaacttagtccaccaaattcaataccgggagatgaattcttgcctgaatgcagatgatctggacctaatgaattcctcaggaggccattctgagccacactgaaaaggaaaatgggaatttataacccagtgagttcagcctttaagataccttgatgaagacctggactattgaatggagcagaaattcacctctctcactgactattacagttgcatttttatggagttcttcttctcctaggattcctaagactgctgctgaatttataaaaattaagtttgtgaatgtgactacttagtggtgtatatgagactttcaagggaattaaataaataaataagaatgttattgatttgagtttgctttaattacttgtccttaattctattaatttctaaatgggcttcctaattttttgtagagtttcctagatgtattataatgtgttttatttgacagtgtttcaatttgcatatacagtactgtatattttttcttatttggtttgaataattttcctattaccaaataaaaataaatttatttttactttagtttttctaagacaggaaaagttaatgatattgaagggtctgtaaataatatatggctaactttataaggcatgactcacaacgattctttaactgctttttgttactgtaattctgttcactagaataaaatgcagagccacacctggtgagggcacaaaga

SEQ ID NO: 820 - DNA, 3807 bp, Homo sapiens
ggctgcagggctccggcaaccgctccggcaacgccaaccgctccgctgcgcgcaggctgggctgcaggctctcggctgcagcgctgggtgtcttcaggcctatggagagcagcttgcgtgggctgggcctgcagtacctggtttgcatagatgattggcaggtggatctaggatccggcttccaacatgtggcagctctgggcctccctctgctgcctgctggtgttggccaatgcccggagcaggccctctttccatcccctgtcggatgagctggtcaactatgtcaacaaacggaataccacgtggcaggccgggcacaacttctacaacgtggacatgagctacttgaagaggctatgtggtaccttcctgggtgggcccaagccaccccagagagttatgtttaccgaggacctgaagctgcctgcaagcttcgatgcacgggaacaatggccacagtgtcccaccatcaaagagatcagagaccagggctcctgtggctcctgctgggccttcggggctgtggaagccatctctgaccggatctgcatccacaccaatgcgcacgtcagcgtggaggtgtcggcggaggacctgctcacatgctgtggcagcatgtgtggggacggctgtaatggtggctatcctgctgaagcttggaacttctggacaagaaaaggcctggtttctggtggcctctatgaatcccatgtagggtgcagaccgtactccatccctccctgtgagcaccacgtcaacggctcccggcccccatgcacgggggagggagatacccccaagtgtagcaagatctgtgagcctggctacagcccgacctacaaacaggacaagcactacggatacaattcctacagcgtctccaatagcgagaaggacatcatggccgagatctacaaaaacggccccgtggagggagctttctctgtgtattcggacttcctgctctacaagtcaggagtgtaccaacacgtcaccggagagatgatgggtggccatgccatccgcatcctgggctggggagtggagaatggcacaccctactggctggttgccaactcctggaacactgactggggtgacaatggcttctttaaaatactcagaggacaggatcactgtggaatcgaatcagaagtggtggctggaattccacgcaccgatcagtactgggaaaagatctaatctgccgtgggcctgtcgtgccagtcctgggggcgagatcggggtagaaatgcattttattctttaagttcacgtaagatacaagtttcagacagggtctgaaggactggattggccaaacatcagacctgtcttccaaggagaccaagtcctggctacatcccagcctgtggttacagtgcagacaggccatgtgagccaccgctgccagcacagagcgtccttccccctgtagactagtgccgtagggagtacctgctgccccagctgactgtggccccctccgtgatccatccatctccagggagcaagacagagacgcaggaatggaaagcggagttcctaacaggatgaaagttcccccatcagttcccccagtacctccaagcaagtagctttccacatttgtcacagaaatcagaggagagacggtgttgggagccctttggagaacgccagtctcccaggccccctgcatctatcgagtttgcaatgtcacaacctctctgatcttgtgctcagcatgattctttaatagaagttttattttttcgtgcactctgctaatcatgtgggtgagccagtggaacagcgggagacctgtgctagttttacagattgcctccttatgacgcggctcaaaaggaaaccaagtggtcaggagttgtttctgacccactgatctctactaccacaaggaaaatagtttaggagaaaccagcttttactgtttttgaaaaattacagcttcaccctgtcaagttaacaaggaatgcctgtgccaataaaagttttctccaacttgaagtctactctgatgggatctcagatcctttgtcactgcctatagacttgtagctgctgtctctctttgtccctgcagagaatcacgtcctggaactgcatgttcttgcgactcttgggacttcatcttaacttctcgctgccccagccatgttttcaaccatggcatccctcccccaattagttccctgtcatcctcgtcaaccttctctgtaagtgcctggtaagcttgcccttgcttaagaactcaaaacatagctgtgctctatttttttgttgttgttgtgactgacagagtgagattccgtctcccaggctggagtgcagtggcgccttctcagctcactgcaacctgcagcctcctagattcaagcgattctcctgcttcagccttccgagtagctgggatgacaggcactcaccaatatgcctgggtaatttttgtatttttaagtacatacaggatttcaccatgttggccaggctagtttcaaactcccggcctcaggtggtctgcctgcctcagcctcccaaagtgttgggattacaggcgtgagccactgggccctgcctgtattttttatcagccacaaatccagcaacaagctgaggattcagctcataaaacaggcttggtgtcttggtgatctcacataaccaagatgctaccccgtggggaaccacatccccctggatgccctccagccttggtttgggctggagtcagggcctgtatacagtattttgaatttgtatgccactggtttgcattgctggtcaggaactctagtgctttgcatagccctggtttagaaacatgttatagcagttcttggtatagagcaaactagaagaaccagcaatcattccactgtcctgccaaggtacacctcagtactccccttcccaactgaagtggtatgaggctagctctttccaaaagcattcaagtttggcttctgatgtgactcagaatttaggaaccagatgctagatcaaataagctctgaaaatctgaggaacattgtaggaaaggtttgttaagcatctcttaagtgccatgatgagcataacagccggccgtcgtggctcacgcctgtaatcccagcactttgggaggccaaggtgggaggatgacaaggtcaggagttcaagaccagcctggccaacatgctgaaacctcacctctactaaaaatacaaaaattagctgggcatggtggcacatgcctgtaatcccagctacttgggaggctgaggcaggagaatcgcttgaacccgggaggcggaggttgcagtgagccaagacagtgccagtgcactccagcctcggtgacagcgcaaggctccgtctcaataattaaaaaaaaaaaaaaaaaaaaaaaggccgggcgcagtggctcaagcctgtaatcccagcactttgggaggctgaggcgggcagatcacctgaggtcaggagttttgagatcagccttggcaacacggtgaaaccccatctctactaaaaatacaaaattagccaagcatgctggcacatgcctgtaatcccagctactcgggaggctgaggtacgagaatcgcttgaacctgggaggcagaggatgcagtgagccgagatcacgccattgcactccagcctgggggacaagagtgaatctgtgtctcaccaaaaaaaaaaagaaaaagaaagatgcttaacaaaggttaccataagccacaaattcataaccacttatccttccagtttcaagtagaatatattcataacctcaataaagttctccctgctcccaaa

SEQ ID NO: 821 - DNA, 2760 bp, Homo sapiens
gttctggagactcaacatgaagctaccggccagggttttctttactctggggtcccggctgccctgtggcctcgctcctcggaggtttttcagttatgggacaaaaatattatatcaaaacactgaagctttgcaatctaaattcttttcacctcttcaaaaagcgatgctaccacctaatagttttcaaggaaaagtggcattcattactgggggaggtactggccttggtaaaggaatgacaactcttctgtccagcctaggtgctcagtgcgtgatagccagccggaagatggatgttttgaaagctaccgcagaacaaatttcttctcaaactggaaataaggttcatgcaattcagtgtgatgtgagggatcctgatatggttcaaaacactgtgtcagaactgatcaaagttgcaggacatcctaatattgtgataaacaatgcagcagggaattttatttctcctactgaaagactttctcctaatgcttggaaaaccataactgacatagttctaaatggcacagccttcgtgacactagaaattggaaaacaactaattaaagcacagaaaggagcagcatttctttctattactactatctatgctgagactggttcaggttttgtagtaccaagtgcttctgccaaagcaggtgtggaagccatgagcaagtctcttgcagctgaatggggtaaatatggaatgcgattcaatgtgattcaaccagggcctataaaaaccaaaggtgcctttagccgtctggacccaactggaacatttgagaaagaaatgattggcagaattccctgtggtcgcctggggactgtagaagaactcgcaaatcttgctgctttcctttgtagtgattatgcttcttggattaatggagcagtcattaaatttgacggtggagaggaagtacttatttcaggggaattcaacgacctgagaaaggtcaccaaggagcagtgggacaccatagaagaactcatcaggaagacaaaaggttcctaagaccactttggccttcatcttggttacagaaaagggaatagaaatgaaacaaattatctctcatcttttgactatttcaagtctaataaattcttaattaacaaacattcattgaatatgtattatgtgccaggccagtgatagccattgtatattcaaagataaataaaatgaaatatagtccttcaaaacattaaaaaaaaaaaaaggaggcatggggagagtaggtaaaggctcctctttacctattgatagaggtaaaaagtacttagaagtgcagagagaacagatctttgtgacttggaaaatcaggagaaactcaatggtggcggtagcatttgagttacataatatactatacctatattaatagggcctaaaagaaagaaattagaggatacacactaaatataatagactttgcctttccagtatactttcttttcactggacttgtgaattatcttctttgggtaactcagtattaactcaaacctttaatttttactaggacctatttgtagccaggcattttatttagtactgaataagctatagccgttgccctttttaaattcattatctagcaagatagtcaaacttataaataattatttatgatacattgtgataagtattattccagcagtatttaagtgtagaggaggaagtaattcattctgtctccagagtttggagaatgtgatgcctaagagatagcatgccatcccagctgtaaaagaagaatagatttctctgggtaaaagaggtaaagaaagcctataaaatatttttgtatatcatttgattaaatttcatctttggtttgactaatttgtcatcctgaaaatcaaataataatgaatccaaagtctcaagtctacagagctatacttttgagcctatatttttaaaatgtccattttgctttcccaggagtcagttacaacatgttcactagactgactatccccattgcccaagttgacacaagaggaaaccagcttccatcttacctcatctgaataaatctgccacaagcccatggaaaccccaattaacattgacagttaattgtgtacataaattacatttattacatttaattgtgtatatataggggatgttataggtttggaataagtggcccaacatttccaattatactgactttcactgggcttttttttaggctgttgcactttttctccacatgcttgcaatacaatactctcaaaataaaacgcagacaggtacctagtctccattttacctttagtactaatcctgtgtattagtctgttctcatgctgctaataaagacataacccaaactgggtaatttataaaagaaagaggtttcattgactcatagttcagcatggctagggaggcctcacaatcatggcagaaggtgagtgaggagcaaagtcatgtcttacgtggtggcacccaagagagcttgtgcaggggaactcccatttataaaaccatcagatctcgtgagacttattcactatcacactattgtgttgatattgtgttcacacaccaataatgatggtttatcactcactccatttccaaacccaccttcccacccacctctcaccaaacacacaaagacacactctttccctccactgattccaccagtatagccatatttctctttctggttaaatttatactaaatgtttacatttatataacttaataaatattatttttttcca

SEQ ID NO: 822 - DNA, 587 bp, Homo sapiens
atggctgctcttgctacataagacctggaacacaggactgctgtctgccctctctgctcgccctgcctagcttgaggatctgtcaccccagccatgaggattatcgccctcctcgctgctattctcttggtagccctccaggtccgggcaggcccactccaggcaagaggtgatgaggctccaggccaggagcagcgtgggccagaagaccaggacatatctatttcctttgcatgggataaaagctctgctcttcaggtttcaggctcaacaaggggcatggtctgctcttgcagattagtattctgccggcgaacagaacttcgtgttgggaactgcctcattggtggtgtgagtttcacatactgctgcacgcgtgtcgattaacgttctgctgtccaagagaatgtcatgctgggaacgccatcatcggtggtgttagcttcacatgcttctgcagctgagcttgcagaatagagaaaaatgagctcataatttgctttgagagctacaggaaatggttgtttctcctatactttgtccttaacatctttcttgatcctaaatatatatctcgtaacaagatg

SEQ ID NO: 823 - DNA, 4824 bp, Homo sapiens
actcgcggccgagcgcggcggccgagccggctccccccacgacgccccgccggacgccggacgcccgagcccgagcccgagcccgagcccgagccgcgccggaacctcccggccgcgcccgccgagccgcggggctgggatgcgcgccgcgagcgcgcgtgcccgcccgcagtgcgcgcgccccggcccgagcgagcgctccccgcggcgttggcggcggcgacggcggcgacggcgacgcggcccgcgcgctcccccggcccctgccccggctgcgcgggcccccgccgggcccatggacggcgcggccgagcgggcgccctgagcgcggcgcgggtccccggagcgcccccgaggcgagcgcgagcgaggtccagcaccatgtgctaggtcactcccagcgcgaggccacacctgggccgtcggagcagcccctcctcacttcaggggtcaccctccccagcacccattgccccaccatggctggggaccggctcccgaggaaggtgatggatgccaagaagctggccagcctgctgcggggcgggcctggggggccgctggtcatcgacagccgctccttcgtggagtacaacagctggcatgtgctcagctccgtcaacatctgctgctccaagctggtgaagcggcggctgcagcagggcaaggtgaccattgcggagctcatccagccggctgcacgcagccaggtggaggctacggagccacaggacgtggtggtctatgaccagagcacgcgggacgccagcgtgctggccgcagacagcttcctctccatcctgctgagcaagctggacggctgcttcgacagcgtggccatcctcactgggggcttcgccaccttctcctcctgcttccccggcctctgcgagggcaagcctgctgccctgctacccatgagcctctcccagccctgcctgcctgtgcccagcgtgggcctgacccgcatcctgcctcacctctacctgggctcgcagaaggacgtcctaaacaaggatctgatgacgcaaaatggaataagctacgtcctcaacgccagcaactcctgccccaagcctgacttcatctgcgagagccgcttcatgcgggtccccatcaacgacaactactgtgaaaaactgctgccctggctggacaagtccatcgagttcatcgataaagccaagctctccagctgccaagtcatcgtccactgtctggctggcatctcccgctctgccaccatcgccatcgcctacatcatgaagaccatgggcatgtcctccgacgacgcctacaggttcgtgaaggacaggcgcccgtccatctcgcccaacttcaacttcctgggccagctgctggagtacgagcgcagcctgaagctgctggccgccctgcagggcgacccgggcaccccctcagggacgccggagcctccgcccagtcctgccgccggggccccgctgccacggctgccaccacctacctcagagagcgctgccacagggaatgcggctgccagggagggcggcctgagcgcgggcggggagccccccgcgccccccacgcccccggcgaccagcgcactgcagcagggcctgcgcggcctgcacctctcctcggaccgcctgcaggacactaaccgcctcaagcgctccttctccctggacatcaagtctgcctacgcccctagcaggcggcccgacggccccgggccccccgaccccggcgaggccccgaagctctgcaagctggacagcccgtcgggggccgcgctgggcctgtcctcgcccagcccggacagcccggacgccgcgcctgaggcgcgcccacggccccgccggcggccccggccccccgccggctcccccgcgcgctcccccgcgcacagcctcggcctgaacttcggcgatgcggcccggcagactccgcggcacggcctctcggccctgtcggcgcccgggctgcccggccctggccagccggccggccccggggcctgggcaccgccgctcgactccccaggcacgccgtcgcccgacgggccctggtgcttcagccccgagggcgcacagggggcgggcggggtgctgtttgcgcccttcggccgggcgggcgccccgggaccaggcggcggcagcgacctgcggcggcgggaggcagcgagggctgagccccgggacgcgcggaccggctggcccgaggagccggccccggagacgcagttcaagcgccgcagctgccagatggagttcgaggagggcatggtggaggggcgcgcgcgcggcgaggagctggccgccctgggcaagcaggcgagcttctcgggcagcgtggaggtcatcgaggtgtcctgacccctccgctgccctcggccccgccgcccgcagccaggcccgttataaatgtatattatatataatgcaaagaaaggtaaatggttttactgggatttttatcgagaagtaaatatttcgattttttatttatttaagctgttcattctggcaatgatttggcaacagtgcgggtggtcctcgagctctatttttactgtctggtatttaaactgaaacatacgtttctaagcaatacgaggccaccttcagtcgcaagctgggtgccaggcctggggcccctcccagttcccccgccccaggaaacactgctgacctttgcaaaggctgccgagctttcgtgcactttttacataacaaaaaggtgaaaaaaaggaaaaaaaaacttctttgccacaaactgagccgcagaaccccccttctccccccacccacctcccctgctccctcccttctctgcgccggcctagggctctgcaccaaagccataggatggaggagcaggagctggtgtgccccggagaggtgcggccagccctccatcagctccaggcaccaaatcttggtggcaaggagggcaccccgctgcccgttgccccagagctgttctctggcaggggaggacaggcattgggcttcatggtgccagggtgttcagaggggctgagaaatagaacagtgtgtgtaggggcttcgggcagggggttctggaacgtcagatgaggtgcagcccaggggaggacagaggtgttagtgcccccaactcctgccagagccccagtccagccacagagtggctcagaaaggccattcctagagggctgcggccctcccttctcccttgcccatgcccccagagctgcctgccgggcagggtggcaccattgcaggagaggagcttggcctccgggggtcaggcaggaggcgcctggctagccagtgctggctccactgggcaggaagccctggacccccaggtatgaggagggggtggtcttagggttctgttccaggtctgccccgcccccctcccagccatgccccaggcagaacttggaattcaggtgtgcacctgcaggctgaggggctctgtgagcaggtgctgctcacacagggagttcaggcgccagccaagcccctgtgctgctgggataggcctgcttcacttagggagcactgcctcaagacaggtaaagccccctcgtttgcccccacccccatggggccgctcaggagagaaactcccattcacccctttcccagggtgctctctctctaggtggcatgccagcccccaaacacaagtggcttttgggcccaggtgggtcagcctgctgcccctgccccataccccctcgggccattgggacccctgcccttcagatgtcctagggtctaggagtggggccagtcactgtgggaagaggccaggggcttggccggagaggcagcccagggcaggacccagtcctgagtcctggagcagggccagggaggcgcccatcccgccccagccagccgccctctctgctgtttcttctatttgttcttcttttcacccacagctctgtgttcctgtcatccctcctttcagcaaaagtcctgttcccgttccctctgtccccacccactcctgttcccccaagaaaataagctatcgttgtatttgcaatctatggattagaggtttaagtatttattattattggttaattattattaattatgtaaatttgcctcccatatgtctgttgcgttgggtttctgaggagaccctgggtgaggaggatgcactggcttcccgcttctcgccccccacccctgtgctgtccgggagacagtggtctggggccactggttgggcccccttctcccttcccccttccccttgtcccttctgcaggccgttgaggggggctgtctgtctcagtctgtctctgctcccactcttgaggcactggttaccgcaaagtgagcagccagcaggggggcgaaggtcctgtgttggccactgcctcctccagtgctgcaggaggcgggctgaggccccacctggtggctttcacctgacccagccctgagtcctctccaagcctctctccggcccctcccacctggccactgcctcctccagtgctgcgggaggcgggccagggccccacctggtggctttcacctgacccagccctgagtcctctccaagcctctctccggcccctcccacctggccactgcctggcattgggatcgccccaaaatggacccggcccctcctgttatttgctgggaagtccagcggaggagagggtgcaggtcccccgctgagcctccagtctctgtagactgggctgccggcccttcagccccccttggagcccctcccgccacagccgcaccttctgctcccggcccctccctttgtatttggagacaatgtgttgtaataaagcttaaagtggatgttttc

SEQ ID NO: 824 - DNA, 3106 bp, Homo sapiens
atcttgagactcgctaagcgtcccagccgcatccctcccgcagcgacggcggcccgggacccgcgggctgtgaaccatgaacacccgcaatagagtggtgaactccgggctcggcgcctcccctgcctcccgcccgacccgggatccccaggacccttctgggcggcaaggggagctgagccccgtggaagaccagagagagggtttggaggcagcccctaagggcccttcgcgggagagcgtcgtgcacgcgggccagaggcgcacaagtgcatacaccttgatagcaccaaatataaaccggagaaatgagatacaaagaattgcggagcaggagctggccaacctggagaagtggaaggagcagaacagagctaaaccggttcacctggtgcccagacggctaggtggaagccagtcagaaactgaagtcagacagaaacaacaactccagctgatgcaatctaaatacaagcaaaagctaaaaagagaagaatctgtaagaatcaagaaggaagctgaagaagctgaactccaaaaaatgaaggcaattcagagagagaagagcaataaactggaggagaaaaaaagacttcaagaaaaccttagaagagaagcatttagagagcatcagcaatacaaaaccgctgagttcttgagcaaactgaacacagaatcgccagacagaagtgcctgtcaaagtgctgtttgtggcccacaatcctcaacatgggccagaagctgggcttacagagattctctaaaggcagaagaaaacagaaaattgcaaaagatgaaggatgaacaacatcaaaagagtgaattactggaactgaaacggcagcagcaagagcaagaaagagccaaaatccaccagactgaacacaggagggtaaataatgcttttctggaccgactccaaggcaaaagtcaaccaggtggcctcgagcaatctggaggctgttggaatatgaatagcggtaacagctggggtatatgagaaaatattgactcctatctggccttcatcaactgacctcgaaaagcctcatgagatgctttttcttaatgtgattttgttcagcctcactgtttttaccttaatttcaactgcccacacacttgaccgtgcagtcaggagtgactggcttctccttgtcctcatttatgcatgtttggaggagctgattcctgaactcatatttaatctctactgccagggaaatgctacattatttttctaattggaagtataattagagtgatgttggtagggtagaaaaagagggagtcacttgatgctttcaggttaatcagagctatgggtgctacaggcttgtctttctaagtgacatattcttatctaattctcagatcaggttttgaaagctttgggggtctttttagattttaatccctactttctttatggtacaaatatgtacaaaagaaaaaggtcttatattcttttacacaaatttataaataaattttgaactccttctgtataaatgggtcatttttatttttaatgaaaagttattggggttttctctcttgaagggtctcattttaattcccttttccaggccgtatagatcaaatatagtactgtcattactgttggctcttgttttggtcttgacttactaatagtgttaccctgattttcagagggggacagtttatctccagaaaggccaatgtttgtatacacatcagctagacacaaatatagacatcatatgtagtttgtacatgtttcagaaacttgttttttctttgctctgtgtaacctatttcctattgctagttcagttggctttcttattcacttctgtgaccctgaaccagttctcagaccctagagtgtaagagcattgattttctacgctgtgtaatctagctcaatccctctgtcccctccgcctcaccgtcccccagccaccacattgtatagcaaaagcattacattcaatcctagaataaaggtaaatacaacaaatcatctttgcagctggacaactaataatactttgcagcattaagagatcttctgtgttaccagtcactctgttgaaatgaactttccgaatctctttattcaggaaaacatggggttttgaaattcttgggccaagagacataactgaggggttcgcagagctaggcaagggtgcactaggaaagggccacattggtgggtggggggtaacagagaacagatggtgtcaggaagtttctctggagtaaataatgtggatattcttggtttccctctcctccgccagctgaagctgtgttagtgctgttgacactaatataaaatgtttggtccatttgaaatccttgtcattgccttatatgggggaaactcaatcccccagcctgtgttggaaatatcaccaaactgattgtaaatgtgcggctgtagcagacattttagtgtggtggtgtgcagccatttcggccctacacctgccagcctggctaccttacagttgtgttccgatttttgcgtctatgcttggtgtgcctcacttgctgcattttccagcatgcaaccaggagttgacgtaggaaaaagggatgctttcttactttggaagctctcagggaagttggtgtcaatttctcctccactgcctggcctaccctgcactcccaaagattttgtgcagatgggtagttccattttttaaaaattgtgcagatatggaaaattgtgacttacttcatgaccagaactatctagaatatgtgtgggggtataaacatcttgcttaaccaaatatctatgtaggcagaggtaaccaggagagaagcaagacttgctgcctaaaggagcccaccattttacttttcacatttaatctgccacgttgaatcaattggaataaaacctgactcgcaggtgactggacaggaaatcccaaagttccaccatttctatgcttaattttaatgtccccccgcttttttttttgtagaaaataaaaacaagaaaatcgttccaatgtaagatgtttgttatagaaactttaggcaatacaggtgtgtaataaaatgtttaataaacttctaaacacttttgtatttggattta

SEQ ID NO: 825 - DNA, 4351 bp, Homo sapiens
acaggctgtaaacacctcccccggagccggccgcggaggactggttgggagttggtagggtcgccccgggacagcccggaagagttcgtttggggctgggggctgggcgggaggaggtgactcgggtttctgtgtaaacttggccgcggttgccgcaggaaggctagccagagggtaattacacagcattttgaaagcgaagcagaagccgtagaatcagcggcgagcctgttgaaagaacccacaggtgcatttcacagcactctgggcgaaaattggatgtgaaaatgaagccagaccgagatactctggatgaatattttgaatatgatgcagaggagttcttggtctctttggccttgctgataacagaaggacgaacacctgaatgttctgtaaaaggtcgaacagaaagctttcattgccctccagcacagtcttgttacccagtaactaccaaacatgaatgtagtgacaagctggcccagtgccgccaagccagacgaactaggtctgaggtcacattgttgtggaagaataaccttccaatcatggtggaaatgatgctactaccagactgctgctacagcgatgatgggcccaccacagagggaattgatctaaatgatcctgcgattaagcaagatgcattattattagaaagatggatcttggagccagttcctcgacagaatggtgaccgatttattgaagagaagacgcttctgttggctgtccgctcatttgtgtttttttctcagttaagtgcatggctgagtgtttctcatggtgctattccacgaaatattctctacagaatcagtgctgctgatgtagacctacagtggaatttttcacagactccaattgagcatgtgtttcctgttcccaatgtttctcacaatgttgccttgaaagtcagtgttcagtccttgcccagacaatctaattatccagttttgacgtgcagtattcacactaatattggcctttatgagaaaagaattcaacaacataaacttaaaactcatcagcaccataacccaaatgaagcagaacaatgtggtacaaacagttcacagcgtctgtgtagcaaacaaacttggaccatggcacctgaaagtgtgttacatgcaaaaagtggcccaagtccagaatatactgcagctgtcaaaaatatcaaactatatccaggcactggcagtaaatctgaccatgggacatctcaagccaatattctaggctttagtggtataggtgatataaaatcacaagaaacatcagtgagaactttaaaatcattttcaatggttgattccagtatctctaaccgccagagtttctggcagtcagctggtgagactaaccctttaataggctctttaattcaggagcggcaagaaatcattgcaagaattgcccaacatttgattcattgtgatccaagcacttcacatgtttctggacgtccatttaatactcaagagtctagttcactccattcaaaacttttccgggtttcacaagaaaatgagaacgtgggaaaaggtaaagaagctttctccatgacttttggtagtccagagtttagttccccagaagacaccaatgaggggaaaattcgactaaaaccagaaactcctcgaagtgaaacttgtatttctaatgacttttattctcatatgcctgttggagagactaatcctttgataggctctttactccaggagcggcaagatgttattgcaaggattgctcaacacttggagcacattgatccaacagcatcacatatcccccggcagtcattcaacatgcatgactccagttcggttgcatctaaagtgtttaggagttcatatgaagacaaaaatttgttgaagaaaaataaggatgagtcctcagtttccatttctcacacaaaatgttccttgttaggagacatcagtgatgggaaaaacttagtacctaataaatgttttacttcttttaaaaataatagtaaagaaaagtgttctttgaaacatcaaacaagaaatcagtgtcagaacaatcctagtgaaatcatccaaagtacgtatcaggagacacagaacaaaagttctagtttatcaacttcctcaattttgtctcagcacaaagaaaataacttagatttgacaagcagattcaaggagcaagaaatgagcaatggaattgataaacagtattcaaattgcaccactattgacaaacagatttgtacaaataagtataaggaaaaaataataaatgagaactataatccaaaattctttggcaatcttcagtctgatgattccaaaaaaaatgactcaaaaataaaagttactgtgttggaaatgtctgaatatttgaacaaatatgaaagcatgtcctcaaataaagactcaaaaaggcctaagacatgtgagcaaaatactcaacttaatagcatagagaattatctcaataaagataatgaaggtttcaaatgtaaaaagtcagaccaattaaaaaatgaacaagataagcaagaagatccaactaatgaaaaatcccaaaactattctcagagaagaagtataaaagactgtttgtctacatgtgagcaaccaaaaaatacagaggtattgaggactacactgaaacattcaaatgtgtggcgaaaacataattttcattccttggatggaacttcaaccagagcctttcatcctcaaactggattgcctcttctttcaagccctgttcctcaaagaaaaacacaatcaggttgctttgatctggattcttcattactacatctgaaaagcttctcatctagaagtcctcgaccatgtttaaacattgaagatgatccagatattcatgaaaaaccatttttgagttctagtgctccacctataacaagtcttagtctcctaggaaattttgaggaatctgtcttgaactatcgtttcgatcctctcggcattgttgatggttttactgccgaggtaggggcaagtggtgctttctgccccacacatttgactcttccagttgaagtgtcattctacagtgtttcagatgacaatgctccctctccttatatgggtgtgattactttagagtcccttggtaaaaggggttatcgagtacctccttcaggaacaatacaagtgaccttatttaatcctaataagactgtggtgaagatgtttgttgtgatatatgatttacgagatatgccagccaatcatcagacattcctacgacaaagaactttttctgtacctgttaaacaagaagtgaagagaagtgttaataaagagaacatccgacacacagaagaacggttattacgctacctcatacatctgaggttccagagttctaaatctggaaagatctacctccatagagacgtacggctcctgttctctagaaagtcaatggaggttgatagcggtgctgcatatgaactcaaatcttacactgaatcaccaacaaaccctcagttttcaccaagatgttgataaggagtgatgatttaaagtatttactcagtacccaagtttgcaagtaaaaattagcatagaatggagtgtaccaaattaacaatcaggagagtggattctctcctgttatcctggaccagtttttatgaaaggattcctgaaatgaaatccatatattccatgtagactggaaaaactcatgtcctaatcctttttgtactgttgaaaccacttcattggacatgttgcaatagcaaaacccccagttagattagtgtttacacattttctcagttatttaatatttaatgttttccttaatactcaagtgatgtttgtctctagtgttctaatgtagcacaaatcctatgtaaaatcatactatgtatttttgacattaatgttgaaatcaaatatatgcacaagtctttaattttgtgtaatgtgttaagtgctgttcatttaagttattgaaaatgagaataaaatgttgagcttctttaaaagtaacacactatgcaagcatgtgtactttttatatctctcatgtttagtttttataacaccatatccaggttgctatctcacatagtagtcctttaacatattgtattagcagtgcaatgtggactaagctgcttcactttccctttgcaagttcagatcatcatgcccattcatagccaggattccttatccccaaaacagttctatttttccttaatcactactatagagtctttacattaaattactgtcgtatgctagataattttctcaaattgttaaaagaatatgtactttggaaacaaattagtatttatattgtaaatatattcaaaaaaaactaa

SEQ ID NO: 826 - DNA, 10419 bp, Homo sapiens
gcacttcccgctcgccggcctcagaggcggcgggtccggcgcgggcgcagcggtgcgggcgctcggctggggcgcggggcggggacgcggccgctgcccgctttgcgccgctcctccctgcgcgagtagcgctggccccggcgtcgaggcggccatggcgacccggagcccgctccccacccaccccgcctgctccgccctcccctccgccccgcgccacctttgatggctcggacctcagccggccaccgccagccctgctcgcgcgcccgcgccgccgccgcccgcgggtattaatagccggcgccgccgcgccctcggccgccgggggcttgggagccgccgatcccggagcccgagccgggagagggagccgccgcagccgccggcgctgtggagatattctctaagccgctttcatcatgggagaaatagagcagaggccgaccccaggatcacgactgggggccccggaaaattcggggatcagtaccttggaacgtggacagaagccgcccccaacaccttcaggaaaactcgtgtccatcaaaatccagatgctggatgacacccaggaggcatttgaagttccacaaagagctcctgggaaggtgctgctggatgcagtttgcaaccacctcaacctcgtggaaggtgactattttggcctcgagtttcctgatcacaaaaagatcacggtgtggctggatctcctaaaacccattgtgaaacagattagaaggccaaagcacgttgttgttaagtttgtggtgaaattctttccgcctgaccacacacaactccaagaagaactcacaaggtacctgttcgcgctgcaggtgaagcaggacttggctcaaggcaggttgacgtgtaatgacaccagcgcagctctcttgatttcacacattgtgcaatctgagattggggattttgatgaagccttggacagagagcacttagcaaaaaataaatacatacctcagcaagacgcactagaggacaaaatcgtggaatttcaccataaccacattggacaaacaccagcagaatcagatttccagctcctagagattgcccgtcggctagagatgtatggaatccggttgcacccggccaaggacagggaaggcacgaagatcaatctggccgttgccaacacgggaattctagtgtttcagggtttcactaagatcaatgccttcaactgggccaaggtgcggaagctgagcttcaagaggaagcgctttctcatcaagctccggccagatgccaatagtgcgtaccaggataccttggaattcctgatggccagtcgggatttctgcaagtccttctggaaaatctgtgttgaacatcatgccttctttagactttttgaagagcccaaaccaaagcccaagcccgtcctctttagccgggggtcatcatttcggttcagtggtcggactcagaagcaggttctcgactatgttaaagaaggaggacataagaaggtgcagtttgaaaggaagcacagcaagattcattctatccggagccttgcttcacagcctacagaactgaattcggaagtgctggagcagtctcagcagagcaccagccttacatttggagaaggtgccgaatctccagggggccagagctgccggcgaggaaaggaaccgaaggtttccgccggggagccggggtcgcacccgagccctgcgccgaggagaagccccgcgggtaacaagcaggcggacggagccgcctcggcgcccacggaggaagaggaggaggtcgttaaggataggacccagcagagtaaacctcagcccccgcagccaagcacaggctccctgactggcagtcctcacctttccgagctgtctgtgaactcgcaggggggagtggcccctgccaacgtgaccttgtctcccaacctgagccccgacaccaagcaggcctctcccttgatcagcccgctgctgaatgaccaggcctgcccccggacggacgatgaggatgagggccggaggaagagattcccaactgataaagcgtacttcatagctaaggaagtgtctaccaccgagcgaacatatctgaaggatctcgaagttatcacttcgtggtttcagagcacagtgagcaaagaggacgccatgccggaagcactgaaaagtctcatattcccgaattttgaacctttgcacaaatttcatactaattttctcaaggaaattgagcaacgacttgccctgtgggaaggccgctcaaatgcccaaatcagagattaccaaagaatcggcgatgtcatgctgaagaacattcagggcatgaagcacctggcggctcacctgtggaagcacagcgaggccttggaggccctggagaatggaatcaagagctcccggcggctggagaacttctgcagagactttgagctgcagaaggtgtgttacctaccgctcaacaccttcctcctgcggccactgcaccggctcatgcactacaagcaggtcctggagcggctgtgcaaacaccacccgccgagccacgccgacttcagggactgccgagccgctttggcagagatcacggagatggtggcacagctccacggtacgatgatcaagatggagaatttccagaagctgcacgaactcaagaaagatttgattggcattgacaatcttgtggttccgggaagggagttcatccgtctgggcagcctcagcaagctctcggggaaggggctccagcagcgcatgttcttcctgttcaacgacgtcctgctatacacgagccgggggctgacggcctccaatcagtttaaagtccacgggcagctcccgctctatggcatgacgattgaggagagcgaagacgagtggggggtgccccactgcctgaccctccggggccagcggcagtccatcatcgtggccgccagttctcggtccgagatggagaagtgggttgaggacatccagatggccattgacctggcggagaagagcagcagccccgcccctgagttcctggccagcagcccccctgacaacaagtcccctgatgaagccaccgcggctgaccaggagtcagaggatgacctgagcgcctcgcgcacatcgctggagcgccaggccccgcaccgcggcaacacaatggtgcacgtgtgctggcaccgcaacaccagcgtctccatggtggacttcagcatcgcagtggagaatcagttgtctggaaacctgctgaggaaattcaaaaacagcaacgggtggcagaagctgtgggtggtgttcacaaacttctgcctgttcttctacaaatcacaccaggacaatcatccccttgccagcctgcctctgctcggctactcgctcaccatcccctctgagtccgagaacatccagaaagactacgtgttcaagctgcacttcaagtcccacgtctactacttcagggcggaaagcgagtacacgttcgaaaggtggatggaagtgatccgcagtgccaccagctctgcctcgcgaccccacgtgttgagtcacaaagagtctcttgtgtattgatggccggacacactcgtttccgcagtggctgctttcctggaagacgtttcctttcttctgtattaatgaagcctggtaaaattaacacctgtctgaaaatcaaaaacatggcttcccagcagctctcctgtctccacagccgcgttttttaaccccgacctctcagcgtctgaatgaacagcgctcccacctccagtcctggcatccgctgggggcgctgttctttagctagtgccagtattaaaacattgtcattacgagagtgccaaatgacatcttccctccaccctgcccctgaaaaacagtacacacacatccgttcaacacaagacagggcaagtgtttttcttcctaaaaaaagttctttcttttattattttcacctattggctgctgcattttacgaagtggacttcccggtgtttgtttgtttgtttgcaatacactcagtgcagccttaagcaaatgagatcattttcagatttcattttttttttcagtctttctacttttgtaataataggaagttagtaggactcacttctctgattaataagcaatttgcagcacacagcgttccactgcggggtttcacgctcacctgaaaacacctgttcccaacctacttcttggtgcaagttgaccaaatcgttttaagtggtaactctttccaaccgtagcagggttgttttctgttaagcaaagccgagatccagtgcaatacctggactgtcaccgtcctgtgagtggtgtacacaatgggaagataataagccgtggtgttttgctgtctgtctgtgtcacaagcatgaaaacccgtgtgtcattgatcagcaccatttgtggtatgttccgtgatgagcgtttagtgagcctgctggctgcagagcactatgaaatcatggtacgtagtccccggcacctgtcgttattcctatatcctcctgcaactgtggtttgaaactgcgcattctctagtagtatatatcgtgcctgtcttcaaaaacatttccctttttatactcattccccccaggcatggggtagtgtcagtcggactgcacagggaacacggtttccagtggctttggcccctactcgggaaacgtctgcctgttctcgatggtgatggggtggctgccattcccttggttttcctaagccctttctaacgagagtctcaaacaagcggaggcgagggccaattcaaccccattctttccagcgccccgcaccatagcacctgcccacctgagaaccaggaacgcaccctctctgtggagctctgactggtgtagctggaaacaaacagcaacttgcaaacggacgaagagcctgccgtgtgttaatcatttgccttacaagatgtaccagacggtttccagtactaacaaagggaataaaaatacctcacgccacaatccagcatattgatgttttaaggcaaaacaaccaactttgtctgtagtcttcattttctgtgtggggggggaggggggaaggggacactccagcaagggtttctaaagccccagtgttcagagtgacacagggagggcctgccccccactgttccctatgctccccccacctccaggcaggggcagagcaaacaaacagctccgggccacacagcagcatcaggctccctccagaagtcaccactcactcattcctggagacttggggacaaggcagtctcctcagctatttatttctgaatgattgattgattccaaactacttgctggacactggtggttctgacctgtgaccagcacctctgcttcctgtgtgccctcaagaaaatactagtgtgggtaacagtccatctgagtggagtttgagacacactacacatgagacacacaatgatgcagatactcgttttcttgagctttattggcccctgcatgatacagtccctgtgcttaagaacatgccctattaggtcactctgcctttgctgacacattttatagcagaaatacacaagctgtttttaaaggagggaaatataaaaaatgtttataaactgacagtgttttgccagaggaaaggtacaaaatgctacatacagaaccaaaccagccacttcacaagagcaatgcagggataaaactattggataaggaaggcagatgcacttccaagaaaatcagaacccagcaagaagtggccagtgcaccccaaaccacactggtgtccacctcattggcagcagccagccaggacacagctcaaaaacgcaggagctaccagccacccagtccacggccctcgtctcccagaggctgagtacctccccaggctgcaggctctgggcagctgagccaggagcagctcagggctggcactgagaggctactggtgacagtaaacccgtctcaaaggctgggcctggctacagaccagcagcagttgacgctgaggcaggttccagtggtagccctggtgcctgggctctctcttaatgcaggcctggaagtggcgacacaaaagccagcttccttggctaagatgcccttaaaaacattggggctgattttgtgcgtctacagaaagtaacagcccaggagagaatgtacacagaggcgagctttctaactccatcaaaccccacctcccccgacaggaaatgctgccagtcaactctaaaagaaccacttgttgctctacgggggaaggggctgagtatgatttgtctggcgactgcagagactccccgttcataccagtattcattagaacccagtccctcgagcggctcacccactgttactagcatgagactggcttcagtgctaaaaactgtgatgtcattgtccatttgtaaatctgaagaactctgtaaatcagaaaagctgctgtccgccctggctcacttaaaaatcaggtaacggcacaccctggggaacacagactcaatctgtgtgattcgcaaggacaaaactcatctttgacttatgccgccggcctcacgtaaggaaacagttccccacacagaatactccctggaaacacaaaatgaaatcttctccaattttattattcaacataacattcttgtatggagtaatgagtacaataagaattagcaactcagttctatttccccaaccaaaatatatcccttatacaaattaagagttcaacccaaatccacttctaataaaatacctcaattttagagcttaaaaaccagactgcactagcaaaccgacacaataacccactcaagcatctgtagctcagggctctgtcccctccctatagcttagaggccactagaccagcagatagctgagctacatccccaagctcacccactaacttccttgcttccaaaaatcctgtcttaactccacaagaactggcacacccacgggagatgtcaatcatcagcttcaacaaacataaaagaatgcttcatgtaccagtcaacagctgctgcacgaaccctcccactccagaaacccagagattttccccctcgccaagcaaggtcccacagcaaaccaagaaaaacagacacactggctgcctgcctagcaagcataggccccttccagagaagcaaaataactcttaaggtccccggcaaccgctacagcaatcgcacagatcagcaacctccaactgcatcatctcggtgagcaagtgcgcaagcagtccagggcgctgacctgggcactcggcagctccaggcctggggacttctccctggagtcttccaaagtgtctcatcacacacacacagccacgagtacacacgcacggccacacatacacagcaggtgccctgtcctctgaagagtcacatttcaaggagtatgcaaaataagcgtgttataaaatttatttgtgtaagcattcagacatttttaggtgggaaagatgatatgcagaatccactacaaggtgcaacagaaaatcgtattggaaaggacggtacatctggcgcagaccagcagtggcacgattccaaacaaatgtcagacgagagcgcttcatggggagaaactgaaaattataatttaaagcttcatgaggcaagatatgttccaatttaaaacactaagaaatagtaccatcgatgaaaaaggaaatcaacctctaggtgtaccaaaaggggcgtagggcaaacggggaaaatttgcatttgttgaggtacaaataggagtgttctgtaagagaggggcattaattattaatgacaaaccctgcaaatacaaaataaaacccaaatcactggtcacagaattcaaaatgtacatgtaataaaggcaaggcaatagactcaagttatggcctgtcgaatatttactccactgacgttatctacagaagcacttggccagtttgtacacagtgattccttatgcacgccgaaagggtttccgtaaaaatgacattatatacaaatctgtacacccatccaccagagcgattctccagctcccagagggagttatcaacttaaagcaggatacctgaggtttcatgtctttagttgccttatcataatcccaaatatacatttcagggtttgtttttgtttttaaagacactttcctggaatatgtgcactatggttaaaattaaaaacaaaagtaataaaataaaataaaatgatcgctggaaggagctgaccctccccacccatctgagagacttcatctggctgcagcacagtgaagactgtgtgtgtccctggacgggcgcctggcgctggggtggctcccagtggcgcacctcttcggtggagtcagcgaaggctctcgttgacttttaaaaaaggaggaggatgaagaaggaaaaaaggaaaaacaaaaccccaaatgccaaaggaatttcagtgggatgaagttcctccaccacttagagagtatctagggaaaaagagagagagagaagtcaacacatgtcatttctcatccctgtgcaaaaattcatatagtaaccaaaatcttagttttcataagaaattccaagtcatacaaaaataagtggagcaaatatcaatgtgtaagtctaattttaaaagaatgcatataaagactgagaagatcatgattcttacacaaaaactccagagcatgtcaccaaaaaccaagaatgggttcagcctccctggagagatgtgaataaaacgggaaatcatatcccttttacttacgatcaattgtcaaaaagtgaacattgatccatacatgatgacacagtaagattccagggatgcatatgcattcccgatgtgagggcaggaaacccattttggccataaaaatagtgatgcagtccaagaatctatttcctagaactgcttccgaaatatggtccaaagcaggaacaacgtgtctgcacaaagatgtctctcgggattttcgtaattacactaatttggaaacaactctgatgcccaacagtacagaatcagttaagtaaattatacaaactgaaataacagactaaaaatggtaattatctgtatttacatatatatattaaagcaatattaaaaatatgtacaagtttaaaagtacatacaaaattacagattgggcatcccttatctgaaatgcttctggctttggatctgggaatatccgcattatacttaccagtgtgcagccccaaatccgaaatctgacatgccccagagagcagttcctttgagccccatgctggcgctcaaaagtttcagattggggatttgggatattcagcctgtatatgtgcactatataagtatatttacatgaacaacttctgtatcctaaattaagtactatagaaattctaaaaaatcttctttgcactataaggtagataagagaattcagtaagtttatgacctggtatgacaacagaaggcaatgcacccaaagatgctgatgagatttgggctacagtggtgggatcatgggtaatttctgtgtcttccaaaaattctacaagattgtcttcagaagacaacaaagggtgagaacggggtcccctcatgaccacaattccctcaaccattttacaacagactccaaatcacaggtccaggagagatggctgaggatgtctttgaccaggcttatctcaaacgttccaatctagagctcctcttttcaggcatttgaaatacttggcatctctcccagagaacaaatggttacataaggtcctcccaaaagcacacattagccacggagcctaagactcaactatcaagaaatacaaatgactaaatcacgggatgagttgatgtcacacaaaagaatccaaacattaattccagctgagacagaaaggctctgaaaatgcttcagaggagaggcggctctcatttttcctacagccatccactgaaacaacatgtttggagcaaaactggcaggaagtctaagccatggccaccgtggttttggcagccatcggggtgaacgctcagtgggagcttcaggagcagggaaggaagaagtgggtaccacagccaagcctgcagagagatgataagcacctcaagaggcagctcatctgaggacagaggaggaaagagggcactcctcatcacagacaaaggaaagagagcaccaacttggcttcccccatgcatcactgcaaagtaaagttttaaacacaacacagacatcaggtagctacagacccgcccgagggtaaatagggtcaaccccagccacgatgcccagtgagcacgtaaaatgtgctgcgtctgaatggagatgtgctaagtgtaaaacacacaccaactccaaagacggtccctccaaaaatgtaaaataccttattgatgattgttgttattaatgttgaaataatactttggatctggcaggttaaaaaa

SEQ ID NO: 827 - DNA, 2284 bp, Homo sapiens
gtctcccgcccgggcctagagcgctgccgggggcgccgggactatgtcgcgggcgcggagccacctgcgcgccgctctattcctggcagcggcgtctgcgcgcggcataacgacccaggtcgcggcgcggcggggcttgagcgcgtggccggtgccgcaggagccgagcatggagtaccaggatgccgtgcgcatgctcaataccctgcagaccaatgccggctacctggagcaggtgaagcgccagcggggtgaccctcagacacagttggaagccatggaactgtacctggcacggagtgggctgcaggtggaggacttggaccggctgaacatcatccacgtcactgggacgaaggggaagggctccacctgtgccttcacggaatgtatcctccgaagctatggcctgaagacgggattctttagctctccccacctggtgcaggttcgggagcggatccgcatcaatgggcagcccatcagtcctgagctcttcaccaagtacttctggcgcctctaccaccggctggaggagaccaaggatggcagctgtgtctccatgcccccctacttccgcttcctgacactcatggccttccacgtcttcctccaagagaaggtggacctggcagtggtggaggtgggcattggcggggcttatgactgcaccaacatcatcaggaagcctgtggtgtgcggagtctcctctcttggcatcgaccacaccagcctcctgggggatacggtggagaagatcgcatggcagaaagggggcatctttaagcaaggtgtccctgccttcactgtgctccaacctgaaggtcccctggcagtgctgagggaccgagcccagcagatctcatgtcctctatacctgtgtccgatgctggaggccctcgaggaaggggggccgccgctgaccctgggcctggagggggagcaccagcggtccaacgccgccttggccttgcagctggcccactgctggctgcagcggcaggaccgccatggtgctggggagccaaaggcatccaggccagggctcctgtggcagctgcccctggcacctgtgttccagcccacatcccacatgcggctcgggcttcggaacacggagtggccgggccggacgcaggtgctgcggcgcgggcccctcacctggtacctggacggtgcgcacaccgccagcagcgcgcaggcctgcgtgcgctggttccgccaggcgctgcagggccgcgagaggccgagcggtggccccgaggttcgagtcttgctcttcaatgctaccggggaccgggacccggcggccctgctgaagctgctgcagccctgccagtttgactatgccgtcttctgccctaacctgacagaggtgtcatccacaggcaacgcagaccaacagaacttcacagtgacactggaccaggtcctgctccgctgcctggaacaccagcagcactggaaccacctggacgaagagcaggccagcccggacctctggagtgcccccagcccagagcccggtgggtccgcatccctgcttctggcgccccacccaccccacacctgcagtgccagctccctcgtcttcagctgcatttcacatgccttgcaatggatcagccaaggccgagaccccatcttccagccacctagtcccccaaagggcctcctcacccaccctgtggctcacagtggggccagcatactccgtgaggctgctgccatccatgtgctagtcactggcagcctgcacctggtgggtggtgtcctgaagctgctggagcccgcactgtcccagtagccaaggcccggggttggaggtgggagcttcccacacctgcctgcgttctccccatgaacttacatactaggtgccttttgtttttggctttcctggttctgtctagactggcctaggggccagggctttgggatgggaggccgggagaggatgtcttttttaaggctctgtgccttggtctctccttcctcttggctgagatagcagaggggctccccgggtctctcactgttgcagtggcctggccgttcagcctgtctcccccaacaccccgcctgcctcctggctcaggcccagcttattgtgtgcgctgcctggccaggccctgggtcttgccatgtgctgggtggtagatttcctcctcccagtgccttctgggaagggagagggcctctgcctgggacactgcgggacagagggtggctggagtgaattaaagcctttgttttttaaagaaatggcaaagccttcgactga

SEQ ID NO: 828 - DNA, 4247 bp, Homo sapiens
agccagaactggaagggccccgccctgtgaagggataggagcctgactgttgcagctgcagtgagtggcggggaagcagcagcggccaggatgaatcccaggtgctctggagctggatggtgaaggtcggcactcttcaccctcccgagccctgcccgtctcggccccatgcccccaccagtcagccccgggccacaggcagtgagcaggcacctgggagccgaggccctgtgaccaggccaaggagacgggcgctccagggtcccagccacctgtcccccccatggagctgaggccctggttgctatgggtggtagcagcaacaggaaccttggtcctgctagcagctgatgctcagggccagaaggtcttcaccaacacgtgggctgtgcgcatccctggaggcccagcggtggccaacagtgtggcacggaagcatgggttcctcaacctgggccagatcttcggggactattaccacttctggcatcgaggagtgacgaagcggtccctgtcgcctcaccgcccgcggcacagccggctgcagagggagcctcaagtacagtggctggaacagcaggtggcaaagcgacggactaaacgggacgtgtaccaggagcccacagaccccaagtttcctcagcagtggtacctgtctggtgtcactcagcgggacctgaatgtgaaggcggcctgggcgcagggctacacagggcacggcattgtggtctccattctggacgatggcatcgagaagaaccacccggacttggcaggcaattatgatcctggggccagttttgatgtcaatgaccaggaccctgacccccagcctcggtacacacagatgaatgacaacaggcacggcacacggtgtgcgggggaagtggctgcggtggccaacaacggtgtctgtggtgtaggtgtggcctacaacgcccgcattggaggggtgcgcatgctggatggcgaggtgacagatgcagtggaggcacgctcgctgggcctgaaccccaaccacatccacatctacagtgccagctggggccccgaggatgacggcaagacagtggatgggccagcccgcctcgccgaggaggccttcttccgtggggttagccagggccgaggggggctgggctccatctttgtctgggcctcggggaacgggggccgggaacatgacagctgcaactgcgacggctacaccaacagtatctacacgctgtccatcagcagcgccacgcagtttggcaacgtgccgtggtacagcgaggcctgctcgtccacactggccacgacctacagcagtggcaaccagaatgagaagcagatcgtgacgactgacttgcggcagaagtgcacggagtctcacacgggcacctcagcctctgcccccttagcagccggcatcattgctctcaccctggaggccaataagaacctcacatggcgggacatgcaacacctggtggtacagacctcgaagccagcccacctcaatgccaacgactgggccaccaatggtgtgggccggaaagtgagccactcatatggctacgggcttttggacgcaggcgccatggtggccctggcccagaattggaccacagtggccccccagcggaagtgcatcatcgacatcctcaccgagcccaaagacatcgggaaacggctcgaggtgcggaagaccgtgaccgcgtgcctgggcgagcccaaccacatcactcggctggagcacgctcaggcgcggctcaccctgtcctataatcgccgtggcgacctggccatccacctggtcagccccatgggcacccgctccaccctgctggcagccaggccacatgactactccgcagatgggtttaatgactgggccttcatgacaactcattcctgggatgaggatccctctggcgagtgggtcctagagattgaaaacaccagcgaagccaacaactatgggacgctgaccaagttcaccctcgtactctatggcaccgcccctgaggggctgcccgtacctccagaaagcagtggctgcaagaccctcacgtccagtcaggcctgtgtggtgtgcgaggaaggcttctccctgcaccagaagagctgtgtccagcactgccctccagggttcgccccccaagtcctcgatacgcactatagcaccgagaatgacgtggagaccatccgggccagcgtctgcgccccctgccacgcctcatgtgccacatgccaggggccggccctgacagactgcctcagctgccccagccacgcctccttggaccctgtggagcagacttgctcccggcaaagccagagcagccgagagtccccgccacagcagcagccacctcggctgcccccggaggtggaggcggggcaacggctgcgggcagggctgctgccctcacacctgcctgaggtggtggccggcctcagctgcgccttcatcgtgctggtcttcgtcactgtcttcctggtcctgcagctgcgctctggctttagttttcggggggtgaaggtgtacaccatggaccgtggcctcatctcctacaaggggctgccccctgaagcctggcaggaggagtgcccgtctgactcagaagaggacgagggccggggcgagaggaccgcctttatcaaagaccagagcgccctctgatgagcccactgcccaccccctcaagccaatcccctccttgggcactttttaattcaccaaagtatttttttatcttgggactgggtttggaccccagctgggaggcaagaggggtggagactgcttcccatcctaccctcgggcccacctggccacctgaggtgggcccaggaccagctggggcgtggggagggccgtaccccaccctcagcaccccttccatgtggagaaaggagtgaaacctttagggcagcttgccccggccccggccccagccagagttcctgcggagtgaagaggggcagcccttgcttgttgggattcctgacccaggccgcagctcttgcccttccctgtccctctaaagcaataatggtcccatccaggcagtcgggggctggcctaggagatatctgagggaggaggccacctctccaagggcttctgcaccctccaccctgtcccccagctctggtgagtcttggcggcagcagccatcataggaagggaccaaggcaaggcaggtgcctccaggtgtgcacgtggcatgtggcctgtggcctgtgtcccatgacccacccctgtgctccgtgcctccaccaccactggccaccaggctggcgcagccaaggccgaagctctggctgaaccctgtgctggtgtcctgaccaccctcccctctcttgcacccgcctctcccgtcagggcccaagtccctgttttctgagcccgggctgcctgggctgttggcactcacagacctggagcccctgggtgggtggtggggaggggcgctggcccagccggcctctctggcctcccacccgatgctgctttcccctgtggggatctcaggggctgtttgaggatatattttcactttgtgattatttcactttagatgctgatgatttgtttttgtatttttaatgggggtagcagctggactacccacgttctcacacccaccgtccgccctgctcctccctggctgccctggccctgaggtgtgggggctgcagcatgttgctgaggagtgaggaatagttgagccccaagtcctgaagaggcgggccagccaggcgggctcaaggaaagggggtcccagtgggaggggcaggctgacatctgtgtttcaagtggggctcgccatgccgggggttcataggtcactggctctccaagtgccagaggtgggcaggtggtggcactgagcccccccaacactgtgccctggtggagaaagcactgacctgtcatgcccccctcaaacctcctcttctgacgtgccttttgcacccctcccattaggacaatcagtcccctcccatctgggagtccccttttcttttctaccctagccattcctggtacccagccatctgcccaggggtgccccctcctctcccatccccctgccctcgtggccagcccggctggttttgtaagatgctgggttggtgcacagtgatttttttcttgtaatttaaacaggcccagcattgctggttctatttaatggacatgagataatgttagaggttttaaagtgattaaacgtgcagactatgcaaaccag

SEQ ID NO: 829 - DNA, 1352 bp, Homo sapiens
agtggctggtaggcagtggctgggaggcagcggcccaattagtgtcgtgcggcccgtggcgaggcgaggtccggggagcgagcgagcaagcaaggcgggaggggtggccggagctgcggcggctggcacaggaggaggagcccgggcgggcgaggggcggccggagagcgccagggcctgagctgccggagcggcgcctgtgagtgagtgcagaaagcaggcgcccgcgcgctagccgtggcaggagcagcccgcacgccgcgctctctccctgggcgacctgcagtttgcaatatgactttggaggaattctcggctggagagcagaagaccgaaaggatggataaggtgggggatgccctggaggaagtgctcagcaaagccctgagtcagcgcacgatcactgtcggggtgtacgaagcggccaagctgctcaacgtcgaccccgataacgtggtgttgtgcctgctggcggcggacgaggacgacgacagagatgtggctctgcagatccacttcaccctgatccaggcgttttgctgcgagaacgacatcaacatcctgcgcgtcagcaacccgggccggctggcggagctcctgctcttggagaccgacgctggccccgcggcgagcgagggcgccgagcagcccccggacctgcactgcgtgctggtgacgaatccacattcatctcaatggaaggatcctgccttaagtcaacttatttgtttttgccgggaaagtcgctacatggatcaatgggttccagtgattaatctccctgaacggtgatggcatctgaatgaaaataactgaaccaaattgcactgaagtttttgaaatacctttgtagttactcaagcagttactccctacactgatgcaaggattacagaaactgatgccaaggggctgagtgagttcaactacatgttctgggggcccggagatagatgactttgcagatggaaagaggtgaaaatgaagaaggaagctgtgttgaaacagaaaaataagtcaaaaggaacaaaaattacaaagaaccatgcaggaaggaaaactatgtattaatttagaatggttgagttacattaaaataaaccaaatatgttaaagtttaagtgtgcagccatagtttgggtatttttggtttatatgccctcaagtaaaagaaaagccgaaagggttaatcatatttgaaaaccatattttattgtattttgatgagatattaaattctcaaagttttattataaattctactaagttattttatgacatgaaaagttatttatgctataaattttttgaaacacaatacctacaataaactggtatgaataattgcatca

SEQ ID NO: 830 - DNA, 1285 bp, Homo sapiens
gctctctgctcctcctgttcgacagtcagccgcatcttcttttgcgtcgccagccgagccacatcgctcagacaccatggggaaggtgaaggtcggagtcaacggatttggtcgtattgggcgcctggtcaccagggctgcttttaactctggtaaagtggatattgttgccatcaatgaccccttcattgacctcaactacatggtttacatgttccaatatgattccacccatggcaaattccatggcaccgtcaaggctgagaacgggaagcttgtcatcaatggaaatcccatcaccatcttccaggagcgagatccctccaaaatcaagtggggcgatgctggcgctgagtacgtcgtggagtccactggcgtcttcaccaccatggagaaggctggggctcatttgcaggggggagccaaaagggtcatcatctctgccccctctgctgatgcccccatgttcgtcatgggtgtgaaccatgagaagtatgacaacagcctcaagatcatcagcaatgcctcctgcaccaccaactgcttagcacccctggccaaggtcatccatgacaactttggtatcgtggaaggactcatgaccacagtccatgccatcactgccacccagaagactgtggatggcccctccgggaaactgtggcgtgatggccgcggggctctccagaacatcatccctgcctctactggcgctgccaaggctgtgggcaaggtcatccctgagctgaacgggaagctcactggcatggccttccgtgtccccactgccaacgtgtcagtggtggacctgacctgccgtctagaaaaacctgccaaatatgatgacatcaagaaggtggtgaagcaggcgtcggagggccccctcaagggcatcctgggctacactgagcaccaggtggtctcctctgacttcaacagcgacacccactcctccacctttgacgctggggctggcattgccctcaacgaccactttgtcaagctcatttcctggtatgacaacgaatttggctacagcaacagggtggtggacctcatggcccacatggcctccaaggagtaagacccctggaccaccagccccagcaagagcacaagaggaagagagagaccctcactgctggggagtccctgccacactcagtcccccaccacactgaatctcccctcctcacagttgccatgtagaccccttgaagaggggaggggcctagggagccgcaccttgtcatgtaccatcaataaagtaccctgtgctcaacca

SEQ ID NO: 831 - DNA, 6812 bp, Homo sapiens
actgaggtcaccctccaggctgtggaacctttgttctttcactctttgcaataaatcttgctgctgctcactctttgggtccacactgcctttatgagctgtaacactcactgggaatgtctgcagcttcactcctgaagccagcgagaccacgaacccaccaggaggaacaaacaactccagacgcgcagccttaagagctgtaacactcaccgcgaaggtctgcagcttcactcctgagccagccagaccacgaacccaccagaaggaagaaactccaaacacatccgaacatcagaaggagcaaactcctgacacgccacctttaagaaccgtgacactcaacgctagggtccgcggcttcattcttgaagtcagtgagaccaagaacccaccaattccggacacgctaattgttgtagatcatcacttcaaggtgcccatatctttctagtggaaaaattattctggcctccgctgcatacaaatcaggcaaccagaattctacatatataaggcaaagtaacatcctagacatggctttagagatccacatgtcagaccccatgtgcctcatcgagaactttaatgagcagctgaaggttaatcaggaagctttggagatcctgtctgccattacgcaacctgtagttgtggtagcgattgtgggcctctatcgcactggcaaatcctacctgatgaacaagctggctgggaagaacaagggcttctctgttgcatctacggtgcagtctcacaccaagggaatttggatatggtgtgtgcctcatcccaactggccaaatcacacattagttctgcttgacaccgagggcctgggagatgtagagaaggctgacaacaagaatgatatccagatctttgcactggcactcttactgagcagcacctttgtgtacaatactgtgaacaaaattgatcagggtgctatcgacctactgcacaatgtgacagaactgacagatctgctcaaggcaagaaactcacccgaccttgacagggttgaagatcctgctgactctgcgagcttcttcccagacttagtgtggactctgagagatttctgcttaggcctggaaatagatgggcaacttgtcacaccagatgaatacctggagaattccctaaggccaaagcaaggtagtgatcaaagagttcaaaatttcaatttgccccgtctgtgtatacagaagttctttccaaaaaagaaatgctttatctttgacttacctgctcaccaaaaaaagcttgcccaacttgaaacactgcctgatgatgagctagagcctgaatttgtgcaacaagtgacagaattctgttcctacatctttagccattctatgaccaagactcttccaggtggcatcatggtcaatggatctcgtctaaagaacctggtgctgacctatgtcaatgccatcagcagtggggatctgccttgcatagagaatgcagtcctggccttggctcagagagagaactcagctgcagtgcaaaaggccattgcccactatgaccagcaaatgggccagaaagtgcagctgcccatggaaaccctccaggagctgctggacctgcacaggaccagtgagagggaggccattgaagtcttcatgaaaaactctttcaaggatgtagaccaaagtttccagaaagaattggagactctactagatgcaaaacagaatgacatttgtaaacggaacctggaagcatcctcggattattgctcggctttacttaaggatatttttggtcctctagaagaagcagtgaagcagggaatttattctaagccaggaggccataatctcttcattcagaaaacagaagaactgaaggcaaagtactatcgggagcctcggaaaggaatacaggctgaagaagttctgcagaaatatttaaagtccaaggagtctgtgagtcatgcaatattacagactgaccaggctctcacagagacggaaaaaaagaagaaagaggcacaagtgaaagcagaagctgaaaaggctgaagcgcaaaggttggcggcgattcaaaggcagaacgagcaaatgatgcaggagagggagagactccatcaggaacaagtgagacaaatggagatagccaaacaaaattggctggcagagcaacagaaaatgcaggaacaacagatgcaggaacaggctgcacagctcagcacaacattccaagctcaaaatagaagccttctcagtgagctccagcacgcccagaggactgttaataacgatgatccatgtgttttactctaaagtgctaaatatgggagtttcctttttttactctttgtcactgatgacacaacagaaaagaaactgtagaccttgggacaatcaacatttaaataaactttataattattttttcaaactttcatatagagttataagattatgatgctggtatctggtaaaatgtacatcccagtagtccaatagtttaaatgtttattgcttcctttaagagattataaattgtataagggacattgtatcactgccttcatttatgcgtgatattgggatggtttcatcaggagatgctttccttgcatctcaatgtcatctgtctaatttctcataaggggattatgttacctagagcagggcttcccaaccctcaggccatagactagctctgatctgtggcctcttaggaacccggccacacagcaggaggtgagcagcaggtaagtgagcattacagcctgagctccacctcctgtcagatcagcagtgacattagattctcacaggagtgggaaccctattgtgaactgtgcatgcaaaagatctaggttgtgtgatccttgtggaacaatataaaccagaaaccaataacgccaccccacctccaacccccgccaaccctctgtggaaaaattaccttccacgaaactggtccctgatgccaaataggttgggggaccgctgacctagagggagttatgcacatgggcttataaggttagccaagagaaaggacaagaagacccaaagtcggcaagcaaatttattaacctgctgggctgctctacagaaatctgaggaggcagacaccgggcttacaggctaaggggtataagtaggtctgcaggggttttgtgtgtgtgtgcgggggtgtcgggggggcaaggccatttgtggagacttttcctcccagtatggccacatcctgcagtttgtcagtttttgcccccgcctggctcagggtaccaggatgtggtttagcttaggggtggttatagtggcacctaagttctgggaacttgcggtgggggcgaccttttggacgaaaaataagctgcagggcagctaggggagggggcttgttatattcctctgggggcagggtgtccctaactgggctcagtcggaaggaacttgaccaaagtctgggctcagttgggcatcactcaggctaatggtcgtgtgctggatgccatcagagggaagtaccaatggtaaagtggaaacaatgtgcagctttcaactgggtggaggctgctattctgtggacagtgagatgtttccttggcactgtcaatagacaatctgcgtagagaaattccaagctgaaagccaataatgttataataaaatagagattcttcagaagatgaaaggaattaccagcatggaaattgtgtcataggcttaagggctaaagaagaagccttttcttttctgttcaccctcaccaagagcacaacttaaatagggcattttataacctgaacacaatttatattggacttaattattatgtgtaatatgtttataatcctttagatcttataaatatgtggtataaggaatgccatataatgtgccaaaaatctgagtgcatttaatttaatgcttgcttatagtgctaaagttaaatgatcttaattctttgcaattatatatgaaaaatgactgatttttcttaaaatatgtaacttatataaatatatctgtttgtacagattttaaccataaaaacatttttggaaaaccataaatcagttcctttgtttgtatttttctcaaagttaaaagtctatagagaaagactgaatttccctaaggagattaagaattgctttaagactagaattaaaacacactttattacatctttttatgtactttttgttactttgttttgtatatctccagtaaaattttttttgtttaaattatagaaacattacacaaagctctgtttttctcccttataagtacttactcatataaggaattttccacttaggtaatatgataggagcttgaatttttttagtcacccaaaatatgatttacttatatacagaaaaaagccgaaaaattttagtgtctgctctttttactgttctttgaagagctttaatatgaggaatttttcatatcagataggatgtggtgctactcagcagtatttctagatttgaactgaagttcagaaggtaccagcatattcaactgagcatttgtctagcaataccctacaattaccttttcaagctgtgcaatttataaagaaaaaaatacattttatcatccaaggaaatgttatcagtaaaaagaatagctctatctccaaattaaatattgatatctttattacccatcttaaagaaattttttaaaatcctgagactcagaaaattaagtcatttaaggtttcacaccttgttactgttaacctagaccatgttacaaagtagttgatttctagtctaatttaacttttgctattatatctcccccaccaaaaaccagagaggcatgctgctttcattagtgatccacagatattcttccccaccagcttccctggatcccactcatccccaaatactctgatctcacaggttagagatctgtcactgggtgcaaaagaacaagaaaaggcactgtaaggtaaacattgatgatttcttgaaactaccagtaagtagcttatattttctgactttctttgtcttactgttgtgaaatcaactgatctagttttaaatgtaatgaaaagcaaagcaatagattctcccctagagcctgcagatggaatgcagccttgttaacatcttgatttaagcttcacagacttctgatttccaaaactgtaagataataagcttctgttgttttaagccacaaaattagtaataatttgttatagcagcaataggaaacaagtacaaaatctttattagttaatactatgaatagttattcataccagctaagagatatttggaatttattatggatcactttattatggtcactgtagtaattcacctgttgctcataaaaaccttataaacatttagtattgttttatggcaattgttattttaaacaatattatcaatgtatgttagtgttatcattattaaagttattattgttaaagcattgaaattaaataaattaaggtcagtaccacagaaggccttttgaatttagaacccacattaataaccatcttgtggtactttcttatcttgcttagtgatacggtttggctgtgtccactcaaatctcatcttgaattatggctcccataatgcccacgtgttgtgggagggaccaggtgggaggtaatcaaatcatgggggtgggttttcatgtgcttttttcatgatagtgaataagtcgcctgagatctgatggcttcataaagggcaattcccctgcacatgctctcttgcctgacaccatgtaagatgtgcctttgttcctctttcatcttctgctgtggttgtgaggcctccccacccatgtgaaactacaagtccattacatctcttttcctttataaattacccagtcttgagtatttcttcatagcagtatgaaaatggactaatatacttaggaaaacatagaaatactgaataatgtgttaaaatttagaaggaattactaaaataattgaaatcaaaagcatagattcaaaacaatgtataagaattcagcacaaaataagcaggtaaagaaatttctaaaatgaagtagagaaaatgtggtaatgactctagtgtataacgatcaccaacagaatagaaagtccaaaaaatagactttataggaataatacagggtaaagatagacttcttagtaggttgggactactggatggccatataggaaaagatcaagttgtaaccagacctcacacacaatacactaaaataagaaaaaggaaccacacccaaattgataaaatataaaatgtaaaactatgaaaatgcatttgaagaaatcaaggttatgttcttcataaacctgtagaggagagggcctttctaaatgtgactcaaaactcttgaaatctctcttgaccccatgtctcagtcagtttcaacacaatctttgttccctttcaaagcaatattttagttagttacatcccattctctgtttttcaaaattattaaatgtgacacatactgaagagtacaaaaaacataaaatgtacaatattcaatataaataaattacaagatgaacgcacaagtaacaacccaggtacatacattcagcattactaaaattctataggtgtatatgacaacttctgacaaccctgctagagccaactaatatcacaactttcacaactattttctaggattttattataaacatgtgagctcctaagtaatgtaattttgtttggcctgttttcaaactttatttaaatggaattacattgtttgtattcttttatgccttgcttcatttgttaataaaatctttataagattcatcta

SEQ ID NO: 832 - DNA, 2273 bp, Homo sapiens
agaaggaggaagaagggccctgctggtcacacaggacccagtctgcggtgggggttttcccgccaccgccccgccctccctggggcccccacctcaccctctcctggcacccttcaccgtcaacctgtcgggccgggtctgagcaggtctggaggtgggcggggagccctggcctccccacctcctcccgtccccaccctgttcccagcactcaagccttgccaccgccgagccgggcttcctgggtgtttcaggcaaggaagtctaggtccctggggggtgacccccaaggaaaaggcagcctccctgcgcacccggttgcccggagccctctccagggccggctgggctgggggttgccctggccagcaggggcccgggggcgatgccacccggtgccgactgaggccaccgcaccatggcccgctcgctgacctggcgctgctgcccctggtgcctgacggaggatgagaaggccgccgcccgggtggaccaggagatcaacaggatcctcttggagcagaagaagcaggaccgcggggagctgaagctgctgcttttgggcccaggcgagagcgggaagagcaccttcatcaagcagatgcggatcatccacggcgccggctactcggaggaggagcgcaagggcttccggcccctggtctaccagaacatcttcgtgtccatgcgggccatgatcgaggccatggagcggctgcagattccattcagcaggcccgagagcaagcaccacgctagcctggtcatgagccaggacccctataaagtgaccacgtttgagaagcgctacgctgcggccatgcagtggctgtggagggatgccggcatccgggcctgctatgagcgtcggcgggaattccacctgctcgattcagccgtgtactacctgtcccacctggagcgcatcaccgaggagggctacgtccccacagctcaggacgtgctccgcagccgcatgcccaccactggcatcaacgagtactgcttctccgtgcagaaaaccaacctgcggatcgtggacgtcgggggccagaagtcagagcgtaagaaatggatccattgtttcgagaacgtgatcgccctcatctacctggcctcactgagtgaatacgaccagtgcctggaggagaacaaccaggagaaccgcatgaaggagagcctcgcattgtttgggactatcctggaactaccctggttcaaaagcacatccgtcatcctctttctcaacaaaaccgacatcctggaggagaaaatccccacctcccacctggctacctatttccccagtttccagggccctaagcaggatgctgaggcagccaagaggttcatcctggacatgtacacgaggatgtacaccgggtgcgtggacggccccgagggcagcaagaagggcgcacgatcccgacgcctcttcagccactacacatgtgccacagacacacagaacatccgcaaggtcttcaaggacgtgcgggactcggtgctcgcccgctacctggacgagatcaacctgctgtgacccaggccccacctggggcaggcggcaccggcgggcgggtgggaggtgggagtggctgcagggacccctagtgtccctggtctatctctccagcctcggcccacacgcaagggagtcgggggacggacggcccgctgctggccgctctcttctctgcctctcaccaggacagccgccccccagggtactcctgcccttgcttgactcagtttccctcctttgaaagggaaggagcaaaacggccatttgggatgccagggtggatgaaaaggtgaagaaatcaggggattgaggacttgggtgggtgggcatctctcaggagccccatctccgggcgtgtcacctcctgggcagggttctgggaccctctgtgggtgacgcacaccctgggatggggctagtagagccttcaggcgccttcgggcgtggactctggcgcactctagtggacaggagaaggaacgccttccaggaacctgtggactaggggtgcagggacttccctttgcaaggggtaacagaccgctggaaaacactgtcactttcagagctcggtggctcacagcgtgtcctgccccggtttgcggacgagagaaatcgcggcccacaagcatccccccatcccttgcaggctgggggctgggcatgctgcatcttaaccttttgtatttattccctcaccttctgcagggctccgtgcgggctgaaattaaagatttcttagaggctg

SEQ ID NO: 833 - DNA, 9697 bp, Homo sapiens
actaatgagcgacgtgcaccggcgcgcacggcccggccaccgctgcggctgcggcggccggcggcggcccgttgtcaggtggagcctttgaattttttaaaagaccatagtaatcagatctacttgaaaaattaagtgaattgatttggttggaatgctcttttaccgatgctttaacatacagccactagattcccagaagttgtgcatgagttcctgtgaggagagttggcatcttggaaatcaaagacggttgtgatgcagttttttgatatgaggataacaggaagcgtcaggacaatcatgcccataagaactctaaactgttcagatcattttatcttagtgaaactggcaattgaactttgctctagttgatgggcaaaatttctcctagactattcatcatcccaatttcatcctagttgaaaattttcaaatgccataagaaatctttatagatttgcacttagcttttggatggacgtttctacaatggagagaactgtgttatagccctggtccaaggacattactagctaatgcccatcgactgtggtgtgcgtgtggaaggttccaaagagaaggagcaatcagcaagtttgcagacaccctggaacatggaagcaaccaagctttaagaagcacagctttggagacactccatgagtctgcactgctttcaggggaactagcacttaagaccttgtgtaacaaaatggacactggggacacagctctaggacaaaaagctacctcaaggtctggagaaactgataaagcatcaggtagatggagacaggaacaatcagctgttattaagatgagcacttttggcagtcatgaaggacagcggcaaccacaaatagagcctgagcaaatcggaaacacagcatcagcacaactgtttggttctgggaaactggcctcccctagtgaagtggtgcagcaagtcgcagagaagcaatatccaccgcatcgtccgagtccttactcatgccaacactcactctctttccctcagcactcattgccacagggggtcatgcacagcaccaagccacatcagagcctcgaaggtcctccgtggcttttccctggccctttgccatccgttgcctctgaggacttatttccttttcctatacatggccacagtggtggttatcctagaaaaaagatttcaagtctgaaccctgcttatagccaatactcccagaaaagtattgaacaggcagaagaggctcacaagaaagagcacaaacccaaaaagcctggcaagtacatttgcccttactgcagcagagcgtgtgccaaacctagtgtactgaaaaaacacatcaggtcccatactggggagcggccatatccatgtataccttgtggtttctctttcaagacaaagagcaatttgtacaagcacaggaagtcacatgcccatgcaattaaggcaggattagtacctttcacagagtcagctgtatctaaattggacctagaggctggttttattgatgtagaagcagaaatacattcagatggtgaacagagtacagacacagatgaggagagttctttatttgccgaggcttctgacaaaatgagtcctggtccacccatcccactggacattgccagcagaggcggctatcatgggtcattggaagaatcattgggaggtccaatgaaggtgccgattttgattatccctaaaagtgggattcctctccctaatgaaagctctcagtatattggccctgatatgctaccaaatccatctttaaatactaaggctgatgattcgcacacagtcaaacagaaacttgcactaagactgtcagagaaaaaaggacaagattctgagccatcgctcaaccttctgagcccgcacagtaaaggaagcactgattctggttacttttctcgctcagaaagtgctgagcagcaaataagccctcccaacacaaatgcaaagtcttatgaagaaatcatctttggaaaatactgtcggcttagtccgagaaatgcactcagtgttacaaccacaagtcaggagcgtgccgcaatgggtaggaagggcataatggaaccattacctcacgttaacaccaggttagatgtcaagatgtttgaagatcctgtttcacagctgatcccaagcaagggagatgtcgaccccagtcaaacgagcatgctgaaatccactaagttcaacagtgagtccagacaaccccagattattccatcatctatcaggaacgaaggaaaactttatccagcaaacttccaaggcagcaacccggttctcttagaagctcctgtagactcttcaccccttattagaagcaactcagtgccaacttcttcagcaactaatctaactattcctccttctttgagaggaagtcactcatttgatgaaaggatgactggttccgacgatgtattctatccagggaccgtgggcataccccctcagcgcatgctaagaagacaagcggcatttgagctgccttcggtacaggagggccacgtggaagtcgagcaccatggcaggatgttgaagggtatcagcagttcatccctgaaggaaaagaaattgtctcctggggacagggttgggtatgactatgatgtctgtcggaaaccctataagaagtgggaggactctgaaacaccaaagcaaaactacagggacatttcctgcttgagttctttaaagcatggtggagaatatttcatggatcccgtggtgccattgcagggagtaccaagcatgtttggaactacctgtgaaaacaggaaacgccggaaagagaagagcgtaggggatgaagaggacacgcccatgatctgcagcagcattgtaagcactcctgtgggcatcatggcttccgattatgaccccaaactgcagatgcaggaaggagtcaggagtggatttgccatggctggacacgaaaacctttctcatggtcacacggaacgctttgacccatgtcggccccaactgcagcctggaagtccatctcttgtgtcagaggagtcaccttcagccattgattcagacaagatgtcagacctagggggcaggaaacctcctggaaatgtgatttctgtgattcagcacaccaactcactgagccgacccaattcatttgaaaggtctgagtcagccgaacttgtggcttgcacacaggataaagccccttccccttcagagacttgtgacagtgagatttcagaagccccagtgagtcctgagtgggctccacctggggatggtgcagaaagtggggggaaaccctctccatctcagcaggtgcagcagcagtcctatcacacacagcccaggctagttcggcaacacaacatccaggttcctgagattcgagtgaccgaggagcctgataaacctgagaaggagaaggaagcccagagcaaagagccagagaagcctgtggaagaatttcagtggccccagagaagtgagaccctttcccagctccccgcggagaagttgccacccaaaaagaagcgtctgcgacttgcagatatggagcactcctcaggggagtccagctttgaatccacaggcacaggcctctcccgcagccccagccaagaaagcaacttgtcccacagctccagtttctccatgtcttttgaaagagaagaaaccagtaagctttctgcacttcctaagcaggatgagtttgggaagcattcagagtttctgactgtccctgctggttcatactcattgtctgtcccaggccatcaccaccagaaagagatgcgacgctgctcatcagagcagatgccttgtcctcacccagcggaagtcccagaagttcggagcaaatcatttgattatgggaatctgtcccatgctcctgtgtcgggagcagcagcctccacggtatcaccgtccagggagaggaagaaatgctttctggtgcggcaagcttccttcagtggctccccagaaatctcccagggcgaggttggcatggatcagagcgtgaagcaagagcagctggagcacctgcatgctggcctccggtccgggtggcaccatggcccgcctgctgtgctgcctcctcttcagcaagaggacccagggaagcaggtggcgggtccttgtcccccgctgagctcggggccactgcacctggcccagccacagatcatgcacatggacagtcaggaatctttgagaaatcccttgatccaaccaacatcctatatgacaagcaagcacttacctgaacagccacacttatttccacatcaagagacaattccattttctccaatccagaatgccttgtttcagtttcagtatcctacagtttgtatggttcatttaccagctcagcagcctccctggtggcaggcacatttcccacatccctttgctcagcaccctcagaagagctatggcaagccctcttttcagacagaaatccattcgagctatcccttagagcatgtggcagagcacactggaaagaaacctgctgagtatgcacacacgaaagagcagacctacccatgttattcaggagcatcagggctacacccaaagaaccttcttccaaagtttccatcagaccagagcagtaagtcaactgaaacgccctctgagcaggttcttcaagaagattttgcctcggcaaatgctgggtctttgcagtccctcccaggaacagtggttcctgttcggatccagacgcacgtaccatcctatggaagtgtcatgtacacaagcatttctcagatacttgggcagaatagccctgccattgtcatatgcaaagtcgatgagaatatgacccaaaggacactggtcaccaacgcagccatgcaagggataggattcaacattgcccaggtgctggggcagcatgcgggcttggagaagtaccccatttggaaagcacctcagactttgcccctcggcttagaatcctccatccccttgtgtttaccttccacctctgacagcgtggccaccctgggaggtagcaagcgaatgctttctccagccagtagcttggagctcttcatggaaaccaagcagcagaaaagggtcaaagaagaaaagatgtacggacagattgtggaggagcttagtgctgtggagctgaccaactcagacatcaaaaaggacctctcccgcccccagaaaccccagctggttcgacaaggatgtgcttctgagccaaaagatggcttgcagtcagggtcatcttccttctcctcgctgtcgccctcctcatctcaagactatccttctgttagcccgtcttccagggagccattcctgcccagcaaggagatgctttccggttcccgggcaccacttccggggcagaagtccagtgggccttctgaaagcaaagaatcttcagatgaattagatatcgatgagacggcatcggacatgagcatgagcccacagagttcttcattaccagcaggagatggtcagctggaagaggaagggaagggccacaagcggcctgttggcatgctggtccgcatggcctctgcccccagcgggaacgtggcagactcaactcttcttctcacggacatggcagatttccagcagattcttcagttccccagtctgcggacaacaactactgtgagttggtgcttcttgaattatacaaaacccaattatgtgcaacaggccaccttcaaatcctcggtttatgcttcatggtgcattagttcctgtaatccaaacccatcaggattgaacaccaagaccacgctggctcttctgaggtccaagcaaaaaatcactgcagaaatttatactctggctgctatgcataggcctggaaccggcaagcttacatcatcaagtgcttggaagcagtttactcagatgaaacctgatgcgtcctttttatttggcagcaaactagaaaggaaactagtgggaaatatcttaaaggaaagagggaaaggagatattcatggagataaagatattggatccaaacaaactgagccaatccgaattaaaatatttgaaggagggtacaaatcgaatgaagattatgtatatgtcagaggacgtggccggggaaagtacatttgtgaagaatgtgggattcgctgtaagaagccaagcatgctcaaaaaacacatccgtacccatactgatgttcggccttatgtatgcaagttatgtaactttgccttcaaaacgaaaggaaacctaacgaagcatatgaaatctaaagcacacatgaaaaaatgcctggaattgggagtctcaatgacatcggtggatgatacagaaactgaggaagcagaaaatttggaagatttgcacaaagcagcagagaagcatagcatgtccagcatttcaactgatcatcagttctccgatgctgaggaatcagatggtgaggatggagatgataatgatgatgatgatgaagatgaagatgactttgacgaccagggagatttaacaccaaaaacaagatcaagaagcaccagtcctcagcctcctagattctcctccttgcctgtgaatgttggcgccgtaccccacggggttccttcagatagttccctgggacattcttcgttgatcagctatttggttactttgccaagtattcgagttactcagcttatgacacccagtgattcatgtgaagatacccagatgacagaataccagaggctattccagagcaaaagtacggactcagaaccagacaaagacagattggacatacctagttgtatggatgaggagtgcatgctaccttcagagccaagctcctctcccagggacttctcaccctcaagccaccattcctctccaggatatgattcttcaccctgtcgagataattcaccaaagaggtatctgatacccaaaggagatttatctcccaggagacatttatcacctaggagagatctgtcacccatgagacatctttcaccaagaaaggaagctgcattgagaagagagatgtcccaaagagatgtttcaccaagaaggcatttgtctccaaggaggccagtgtctcctgggaaagatatcacagcaagaagagacctctctcctagaagagagagaagatacatgaccacaataagagcgccatctcccagaagggctttataccataacccaccattgtccatgggacagtatttgcaagcagagccaattgtattggggcctcctaatttaagaagaggattacctcaggttccttacttcagtctctatggagaccaagaaggtgcttatgaacatccaggctccagccttttccctgagggtcctaatgactatgtcttcagtcatcttccactccactctcagcaacaagtgcgagcccctatccccatggtgcccgttggtgggatccagatggttcactccatgccgccagccctttccagtttacatccttcacccacattgcccctgccaatggagggctttgaggagaagaaaggcgcgtcaggggagtccttctccaaggacccctatgtgctttctaagcagcatgagaagcgaggtcctcacgctttgcagtcatctggtccacctagcactccctcctctcctcggctgttgatgaaacagagcacttcggaagacagcctaaacgcaacagagcgggaacaggaggaaaatatacagacttgtacaaaagccattgcctctctccggattgccacggaagaggcagctctgctcgggccagatcagccagcgcgggtgcaggagccccaccagaaccccctgggaagtgcacatgttagcattagacactttagtagacctgagccaggtcagccctgtacctcagccacccaccctgacttgcatgatggtgaaaaggacaattttggtacatcacagactccattagctcactccacgttttacagcaagagttgtgtggatgacaagcagttggactttcacagcagcaaggaattatcttcaagcacagaggaaagcaaagatccttcatcagaaaagagtcagctacattgatctatgatgcatggagactttcatttccacattttcccatttttttgtttttgtttttctagaaatggaggtaatccagtttatagcatgcctgtcctaagttacagtagtttgctattatatatacttttgttatatcaaaagaattaggtaaattaacaagtcatcatgagcctgaccaaaacaaaatttgaaattaacctattgggtctggtacttttaaaattgtacagatgtttgtgccttttctttactttgcttatattcttataagcattttttagcagtaatttgtacatattttagaatttgtgtatctgctttgtaataaatgtaatttctttccttttttggacacttggatctaaatgatgtaaagcaaaacagcatcaatatatatgtgaggttgcactaaaacatatttttatatgattaaaactgaacagcttttatgtacagctctgattctgtaatactaatatttatttactttgtttcataaattgtacattttttcttaatgttgtggattgcttttctatgtgaagcatgggatttactgttgcgtaactagaacaaaaatgtacattgtaaacaagatatttaaactagagtatcttattctgcacttatgcattagttaaaaaaagataaaggatgtatcagtcagttcttaactcttgtatatttttttgtctcttgtttgctggattgactataacttaagtgctgattgtgattttaaaatgatagtaccgtaaagcattaaagtaaacaatgtgctattgtgagttttttcaaagctttataaatcagttataaataatattaaaagtatttggtcttatgtgaacatgttgatctatatactcatctaaaaatatgggaaaacattccaccccatgtaaatatgtacaagtgcatcactggtacaattttatgtaactcagttggacactaggttgccacagacctatgctaggtgtctttaaaaaattaaggtgacaaagcacatgggactgtgtagagcttggttatcggccggcccggtggcttggcaggcagtgctgtgcgctgctcatggagaagacctgggcttagcaatctccttagttcttgctacacaggatggtgactggaactaaggctacacagagggtcgcacttggactctgagggttgggtgtggaagggggaaaaggagatggagacctgctccccagctcttcctgtcagccggtttacatgggaacagggttaacatctgtgttaggggaggtcaccttaccctttttcataggggaagagtgtcacactcctggctatctcagggggaatggggaaaagaatctttcaagggcaaagaactcgtgggaggatgtctgttgtatgtaatactcacaatggcttttggttagtgttgaaggtgggaagagcatttgtaggtccagaagagtgaaagagagggaggggtgcagcaacatgtgcacaggcacgcacatgtgtgcacgcacacatacaatctgggttatctttgtgctatatagtggattataattctgtgaaaccaagtttgtatattgaattacattaaggagtgttctttaaaaagagaaataaatatacaattacatgctt

SEQ ID NO: 834 - DNA, 1536 bp, Homo sapiens
agagtctcctcagacgccgagatgctggtcatggcgccccgaaccgtcctcctgctgctctcggcggccctggccctgaccgagacctgggccggctcccactccatgaggtatttctacacctccgtgtcccggcccggccgcggggagccccgcttcatctcagtgggctacgtggacgacacccagttcgtgaggttcgacagcgacgccgcgagtccgagagaggagccgcgggcgccgtggatagagcaggaggggccggagtattgggaccggaacacacagatctacaaggcccaggcacagactgaccgagagagcctgcggaacctgcgcggctactacaaccagagcgaggccgggtctcacaccctccagagcatgtacggctgcgacgtggggccggacgggcgcctcctccgcgggcatgaccagtacgcctacgacggcaaggattacatcgccctgaacgaggacctgcgctcctggaccgccgcggacacggcggctcagatcacccagcgcaagtgggaggcggcccgtgaggcggagcagcggagagcctacctggagggcgagtgcgtggagtggctccgcagatacctggagaacgggaaggacaagctggagcgcgctgaccccccaaagacacacgtgacccaccaccccatctctgaccatgaggccaccctgaggtgctgggccctgggtttctaccctgcggagatcacactgacctggcagcgggatggcgaggaccaaactcaggacactgagcttgtggagaccagaccagcaggagatagaaccttccagaagtgggcagctgtggtggtgccttctggagaagagcagagatacacatgccatgtacagcatgaggggctgccgaagcccctcaccctgagatgggagccgtcttcccagtccaccgtccccatcgtgggcattgttgctggcctggctgtcctagcagttgtggtcatcggagctgtggtcgctgctgtgatgtgtaggaggaagagttcaggtggaaaaggagggagctactctcaggctgcgtgcagcgacagtgcccagggctctgatgtgtctctcacagcttgaaaagcctgagacagctgtcttgtgagggactgagatgcaggatttcttcacgcctcccctttgtgacttcaagagcctctggcatctctttctgcaaaggcacctgaatgtgtctgcgtccctgttagcataatgtgaggaggtggagagacagcccacccttgtgtccactgtgacccctgttcccatgctgacctgtgtttcctccccagtcatctttcttgttccagagaggtggggctggatgtctccatctctgtctcaactttacgtgcactgagctgcaacttcttacttccctactgaaaataagaatctgaatataaatttgttttctcaaatatttgctatgagaggttgatggattaattaaataagtcaattcctggaatttgagagagcaaataaagacctgagaaccttcca

SEQ ID NO: 835 - DNA, 1348 bp, Homo sapiens
actggactcccgtgagctggaaggaacagatttaatatctaggggctgggtatccccacatcactcatttggggggtcaagggacccgggcaatatagtattctgctcagtgtctggagatcatctacccaggctggggcttctgggacaggcgaggacccacggaccctggaagagctggtccaggggactgaactcccggcatctttacagagcagagcatgatcacattcctgccgctgctgctggggctcagcctgggctgcacaggagcaggtggcttcgtggcccatgtggaaagcacctgtctgttggatgatgctgggactccaaaggatttcacatactgcatctccttcaacaaggatctgctgacctgctgggatccagaggagaataagatggccccttgcgaatttggggtgctgaatagcttggcgaatgtcctctcacagcacctcaaccaaaaagacaccctgatgcagcgcttgcgcaatgggcttcagaattgtgccacacacacccagcccttctggggatcactgaccaacaggacacggccaccatctgtgcaagtagccaaaaccactccttttaacacgagggagcctgtgatgctggcctgctatgtgtggggcttctatccagcagaagtgactatcacgtggaggaagaacgggaagcttgtcatgcctcacagcagtgcgcacaagactgcccagcccaatggagactggacataccagaccctctcccatttagccttaaccccctcttacggggacacttacacctgtgtggtagagcacactggggctcctgagcccatccttcgggactggacacctgggctgtcccccatgcagaccctgaaggtttctgtgtctgcagtgactctgggcctgggcctcatcatcttctctcttggtgtgatcagctggcggagagctggccactctagttacactcctcttcctgggtccaattattcagaaggatggcacatttcctagaggcagaatcctacaacttccactccaagtgagaaggagattcaaactcaatgatgctaccatgcctctccaacatcttcaaccccctgacattatcttggatcctatggtttctccatccaattctttgaatttcccagtctcccctatgtaaaacttagcaacttgggggacctcattcctgggactatgctgtaaccaaattattgtccaaggctatatttctgggatgaatataatctgaggaagggagttaaagaccctcctggggctctcagtgtgccatagaggacagcaactggtgattgtttcagagaaataaactttggtggaaa

SEQ ID NO: 836 - DNA, 4302 bp, Homo sapiens
aactgaaaatccacaagacagaatagccagatctcagaggagcctggctaagcaaaaccctgcagaacggctgcctaatttacagcaaccatgagtacaaatggtgatgatcatcaggtcaaggatagtctggagcaattgagatgtcactttacatgggagttatccattgatgacgatgaaatgcctgatttagaaaacagagtcttggatcagattgaattcctagacaccaaatacagtgtgggaatacacaacctactagcctatgtgaaacacctgaaaggccagaatgaggaagccctgaagagcttaaaagaagctgaaaacttaatgcaggaagaacatgacaaccaagcaaatgtgaggagtctggtgacctggggcaactttgcctggatgtattaccacatgggcagactggcagaagcccagacttacctggacaaggtggagaacatttgcaagaagctttcaaatcccttccgctatagaatggagtgtccagaaatagactgtgaggaaggatgggccttgctgaagtgtggaggaaaaaattatgaacgggccaaggcctgctttgaaaaggtgcttgaagtggaccctgaaaaccctgaatccagcgctgggtatgcgatctctgcctatcgcctggatggctttaaattagccacaaaaaatcacaagccattttctttgcttcccctaaggcaggctgtccgcttaaatccagacaatggatatattaaggttctccttgccctgaagcttcaggatgaaggacaggaagctgaaggagaaaagtacattgaagaagctctagccaacatgtcctcacagacctatgtctttcgatatgcagccaagttttaccgaagaaaaggctctgtggataaagctcttgagttattaaaaaaggccttgcaggaaacacccacttctgtcttactgcatcaccagatagggctttgctacaaggcacaaatgatccaaatcaaggaggctacaaaagggcagcctagagggcagaacagagaaaagctagacaaaatgataagatcagccatatttcattttgaatctgcagtggaaaaaaagcccacatttgaggtggctcatctagacctggcaagaatgtatatagaagcaggcaatcacagaaaagctgaagagaattttcaaaaattgttatgcatgaaaccagtggtagaagaaacaatgcaagacatacatttccactatggtcggtttcaggaatttcaaaagaaatctgacgtcaatgcaattatccattatttaaaagctataaaaatagaacaggcatcattaacaagggataaaagtatcaattctttgaagaaattggttttaaggaaacttcggagaaaggcattagatctggaaagcttgagcctccttgggttcgtctacaaattggaaggaaatatgaatgaagccctggagtactatgagcgggccctgagactggctgctgactttgagaactctgtgagacaaggtccttaggcacccagatatcagccactttcacatttcatttcattttatgctaacatttactaatcatcttttctgcttactgttttcagaaacattataattcactgtaatgatgtaattcttgaataataaatctgacaaaatattagttgtgttcaacaattagtgaaacagaatgtgtgtatgcatgtaagaaagagaaatcatttgtatgagtgctatgtagtagagaaaaaatgttagttaactttgtaggaaataaaacattggacttacactaaatgtttaattcattcattttattgtgaaataaaaataaaatccttagctcctccaccaactgaacagaccctcttggccaaggagaccccagaaaccttaaaaactaagtttcccaaccatgacaagatgagagatcattcacacctcattatattccctcccttgctaactgccattggactttttccactgagttaaacagaaacccatggaaaacaaagaacagaagactcactccttggctgacttcacctagctcactccacgtagcgccacagccagactcccctcccctcttgcggtttccacatgacaactgatcagccttccctcctgataagtgaccactgcccacagactggttctggccagtccatggaggctgcacacagggtgcctctatgtcctttgtttcaccttttgatatagaaaggctaattttgctgtattttaatgttaagtctccaccacagagtgaacacagaatgcatgtgacatacatgtttacataccactattgtgtgactgcccctcatgaatattcatagccccccataacctgttaactatgtgtgtctagccaatccaccaaccataaaacttctgtaataccctcccttcctccaagagcctgcttttggttgctgtggtaggctctgcttcccaggctgcaggttgcaggagaggaggctgcagtggctcacgcctgtaatctcagcacttcgatgggacgaggcaggcagatcacctgaacccaggagttcgagagcagccttggcaatggcaaaaccaaccgtctctacaaaaaatgcaaaaacttagctgggtgtggtggcatgcacctgtagcttcagttccagctactcaggaggctgaggtgagtggactgctggagccagggagttcgaggctgcagtgtcgagatcttgccactgcactccattctggatgatagaacgagaccccatctcaaaaaaaaaaaaagttctctccaattgtatatagcttgtgattttatgtcaacactatcaataaatagctttcagtgcaagaaaccaaaaatactgtaataaacaggcacatattcttcccaaacctcatgcagtttacaatctagtgagagacacagatagcagtacagagtcaattaaaggttagttttcttcatgaagatgttttaattttaattcaatgtgaaagggttccaaggagtttatcttgttttatgccattttatttgaagcactacttactaagtcatttgctgatattaatctagttaaatcaagaaatattacatgaaaatgttgctaaatcagagatcatgggtaacaatcacctttgattatgaataatcatattttattgaaaggcaaggcacaacaaataataagaaggaaaaaataaataagcaatgttattgatctttcattctgtatatgttttggggggaatatactagtttcttttagtggctgtaacaaattaccacaaacttggtgacttaaaatttcacagatttactctttcttacagttctggaggtcagaagtctgaaatgggtttcaatgagccaaagtcaaggtattgatgacgctacactcctccggaggctctaggcagatagccttttccagcttccagaggctgcctgaattctttcatccatcttaaaaaccaacagtgtagtagcctcaaatctctctctctgcttccttcttcacatctccttctctcctctgactcttttgcctctttcttctaaggacgcaccaggtccacctgcataatccagaataattgccccatccgcaaatccttaatttaataacatctgcaaagtcccttttgctatgtaaagtagcatgttcacaggttctggagacttggccatggatacgattgcggggggggcattattcttaccacagagcaccccaagaaaatctccaaattttgggcttccaatccattttgcttcaattatttaatatttttactccttccagtagatactgatttcatccattgcccttaagaaggtaggacagagattatggcacatctcacattaaatgctatattttcgttggaaatacattttttgcttcaacttttattttaaattcaagggtacatgtgcaggatgttcaggtttgttacacaggtaaacgtgtgccatggcggtttgctgaacagatcatcccatcaccaacagatcatcccattgagaggtgaagccggctgggcttctgggttgggtggggacttggagaacttttctgtctagctaaagtattgtaaaatggaccagtcaacactctgtaaaatggaccaatcagctctctgtaaaatggaccaatcagcaggatgtgggtggggccaagtaagggaataaaagcaggccacccgagctggcagcggcaacccgctcgggtccccttccatgctgtggaagttttgttctttcgctctttcaataaatcttgctgctgctca

SEQ ID NO: 837 - DNA, 611 bp, Homo sapiens
gagaaccatcccagtaacccgaccgccgctggtcttcgctggacaccatgaatcacactgtccaaaccttcttctctcctgtcaacagtggccagccccccaactatgagatgctcaaggaggagcacgaggtggctgtgctgggggcgccccacaaccctgctcccccgacgtccaccgtgatccacatccgcagcgagacctccgtgcccgaccatgtcgtctggtccctgttcaacaccctcttcatgaacccctgctgcctgggcttcatagcattcgcctactccgtgaagtctagggacaggaagatggttggcgacgtgaccggggcccaggcctatgcctccaccgccaagtgcctgaacatctgggccctgattctgggcatcctcatgaccattctgctcatcgtcatcccagtgctgatcttccaggcctatggatagatcaggaggcatcactgaggccaggagctctgcccatgacctgtatcccacgtactccaacttccattcctcgccctgcccccggagccgagtcctgtatcagccctttatcctcacacgcttttctacaatggcattcaataaagtgcacgtgtttctggt

SEQ ID NO: 838 - DNA, 1037 bp, Homo sapiens
aacaggaagcagcttacaaactcggtgaacaactgagggaaccaaaccagagacgcgctgaacagagagaatcaggctcaaagcaagtggaagtgggcagagattccaccaggactggtgcaaggcgcagagccagccagatttgagaagaaggcaaaaagatgctggggagcagagctgtaatgctgctgttgctgctgccctggacagctcagggcagagctgtgcctgggggcagcagccctgcctggactcagtgccagcagctttcacagaagctctgcacactggcctggagtgcacatccactagtgggacacatggatctaagagaagagggagatgaagagactacaaatgatgttccccatatccagtgtggagatggctgtgacccccaaggactcagggacaacagtcagttctgcttgcaaaggatccaccagggtctgattttttatgagaagctgctaggatcggatattttcacaggggagccttctctgctccctgatagccctgtgggccagcttcatgcctccctactgggcctcagccaactcctgcagcctgagggtcaccactgggagactcagcagattccaagcctcagtcccagccagccatggcagcgtctccttctccgcttcaaaatccttcgcagcctccaggcctttgtggctgtagccgcccgggtctttgcccatggagcagcaaccctgagtccctaaaggcagcagctcaaggatggcactcagatctccatggcccagcaaggccaagataaatctaccaccccaggcacctgtgagccaacaggttaattagtccattaattttagtgggacctgcatatgttgaaaattaccaatactgactgacatgtgatgctgacctatgataaggttgagtatttattagatgggaagggaaatttggggattatttatcctcctggggacagtttggggaggattatttattgtatttatattgaattatgtacttttttcaataaagtcttatttttgtggcta

SEQ ID NO: 839 - DNA, 5391 bp, Homo sapiens
agagcgcactggagccctggccagcgcgcagccttcccggcgccggcgggctgggtcttgggaattctggtttgctttggctcactcgctttttacaaaccactggatcttacatgcctctgtaccccccacttccactccatgtccccatgctcctgcgccagcaacaggacatgttctctggatgtcagctgagtcattaaagtaactctgcatgtcagtagacagaccttggtagaaccacaaggctcccagagacacccatctctcctcatttttttggtgtgtgtgtcttcaccgaacattcaaaactgtttctccaaagcgttttgcaaaaactcagactgttttccaaagcagaagcactggagtccccagcagaagcgatgggcagtgtgcgaaccaaccgctacagcatcgtctcttcagaagaagacggtatgaagttggccaccatggcagttgcaaatggctttgggaacgggaagagtaaagtccacacccgacaacagtgcaggagccgctttgtgaagaaagatggccactgtaatgttcagttcatcaatgtgggtgagaaggggcaacggtacctcgcagacatcttcaccacgtgtgtggacattcgctggcggtggatgctggttatcttctgcctggctttcgtcctgtcatggctgttttttggctgtgtgttttggttgatagctctgctccatggggacctggatgcatccaaagagggcaaagcttgtgtgtccgaggtcaacagcttcacggctgccttcctcttctccattgagacccagacaaccataggctatggtttcagatgtgtcacggatgaatgcccaattgctgttttcatggtggtgttccagtcaatcgtgggctgcatcatcgatgctttcatcattggcgcagtcatggccaagatggcaaagccaaagaagagaaacgagactcttgtcttcagtcacaatgccgtgattgccatgagagacggcaagctgtgtttgatgtggcgagtgggcaatcttcggaaaagccacttggtggaagctcatgttcgagcacagctcctcaaatccagaattacttctgaaggggagtatatccctctggatcaaatagacatcaatgttgggtttgacagtggaatcgatcgtatatttctggtgtccccaatcactatagtccatgaaatagatgaagacagtcctttatatgatttgagtaaacaggacattgacaacgcagactttgaaatcgtggtcatactggaaggcatggtggaagccactgccatgacgacacagtgccgtagctcttatctagcaaatgaaatcctgtggggccaccgctatgagcctgtgctctttgaagagaagcactactacaaagtggactattccaggttccacaaaacttacgaagtccccaacactcccctttgtagtgccagagacttagcagaaaagaaatatatcctctcaaatgcaaattcattttgctatgaaaatgaagttgccctcacaagcaaagaggaagacgacagtgaaaatggagttccagaaagcactagtacggacacgccccctgacatagaccttcacaaccaggcaagtgtacctctagagcccaggcccttacggcgagagtcggagatatgactgactgattccttctctggaatagttactttacaacacggtctgttggtcagaggcccaaaacagttatacagatgacggtactggtcaagatgggtcaagcaagcggccacaagggactgaggcaagcacaatggtttcaaagaaagactgtaagctccatgattagcataaagcactaaccatgtctccatgtgacccgatggcacatagatgttgtagaataagttatgggtttttatgttttgttttgtgtttttccaaaacttgaacttgcaggcaagccttggttgggtatttgatttatccagaatgcttctctttagggaacaaggatgtttttaatggcataacaaaggcaagactctgccttaatttttgaaaagctgctaactacatgaacacaaatgtgtatttttgttgcagtgtagttttccttttgtgtaattttaaagtcagtgttgaattttattgaaagctcatgatgcgcttcaaagtggcaagtatttggctattaactgccaaaacaagagcctgattttttgaggccagtaattcgtttgctagaattgattttttttctctctctctttgttacataagggcattatgtaacactagccgaatggtagcctctgggttgttgtttttttcttttcctccatgatgttaatgggttatctcaaattttaagttaaactacctaaaataaataccaaagataatgcatatttttgcacagtggagcttacacttaaaagaaaacaaagccccatgggctgccttgaaatcaagagacaataactttgaacctcagcaagaccttgaaccgccggttcattttgcaccttattcagaaaatagagcatcatactcaccgagtctagtcagtgtagtgcttttaaaaattttgtcctttcatgtaacttttttattttaagaggaagaagaagaaaggggcacacacacacaataccgacgtctatcctttcctgctaggcagtgctggccaggctcatgtgtagtgtgcgagatggtgatgtactcttatatttttctgggcttttccttttgcacattccaaaattcatttcataagacaagatcttcataggacctccttggcatcctggcattctcaaaactgagccatccagcatgaaagataaatgggtttaaacccttgctgctgaatttattgcctggactgtcaggacatcaccagcccaccttcaccttagggaagatgccacacctggcctccacacttgctcttctgatcagtctgtctggattgagtcctacagtgtcagatagggcggcaaatgccaaagcagggaaacagggaggtgtggacaagccagtttgatgcagcacttcagatcaagtgcttaggaaggagaggaaacttgccttttttatggcagaggatagtaatgaaaatgtctcagtattttagggtcaatgagagccataaaaatataacataatcacaagtaaaggagataatggtctaaaacagctatttcccttttctgtgtgcatacttatgactgaatgtgagctaagcattttctcctgtggagccctagagcaggttactaaggaaggacacattgttttccagaagcctcccctgcctggctgactgccttgctagaaacataattttttttttctcactgaagctcaataatggaactctttttttttttttttttaatttaaagttccctatttgtgaattctgggattactgacttttctttttaattggagtctcaaaatcaactctcttatggtattatatctctgtatgccattaaaaaacagcttgttctagaatcatgtattttgtaaactgatgtttgtgatggtctctggttcttgaacagccatatctgaatgccgtgcctgcaaaactatgacaatttttgctgttttcagccttcagatttgatggcttgggaaactgaggtgttattttcaatgaaacaaagaaagagatgttaagcaagtggttgttttagatccaaatgtaaaggcaggtttgggaaggtgtttaaagagttggaggaattggggattgagttgtaaagaaaacttacagaagaggcaacaatttggttcttgacagtgagaggatattgagggcttcagctgctgctattatgatgttttgcaaaggaaaataatcaaaccaaagagtattcagtgatatgtaaattaaatgaagatacagtggagaatgggggtgaccacaaaagaggctccccctaaacacacagtgctgccacttaaaaagacttgagaaatttgaaagggggtgggtatggggggggcaagaaagagggagggaaatctttcaacttatttctgaaaaagagaaaaaaatataaaatttctggtgcacaggtttgttttttcaagaaaattttgcagaagctatgtttttaaagtgtacattttataaagtttatcagatattttcatatttaaagccaaatgtaaatagaggtctgtaaagaaaaataattgccatagaaagtataatttcagtgcagtaatttctgagagctagtacctatatgctaccggttagcatggttttagcaaatatataccagccttataaggttcgtattgctatgttcttctgttatttatttcagcatggactgttcatttgaaacctttttctagttattagcgttttaacagttacaagctttaaatggcaattttttttttttttttttttttttttttttttttgtcaagagccaagacacaggtaatgcacgacattgattgctgcattttaccttcaaaatatttgtccttattgactgggtctccttaattaatgtacacatgtcattagaatgcagacggaggggactcaccatgaatatctggggttgattcccagatgtgtgttgcttctctattgcaagcagattccctgttggatttacttcggatttattcccttttaaagaatttttgcccatatctggaagggcactatatttttgggaggagccatagattcctggttatcctatttttaaacaaaatgtagacaaagtgaactctattttgattattgagaaaggagtagttttctatccctctaagagtatacttgaatcagacattttaaggatgtcactatggcactgttgtcatttccaaattcctagaaaagtttgttttactttgtttttattctgttaatgcattctttcttctctttacttcctttcttaccagtacactcctatctcaactctgtttatttgatgagttctgtcccgtaaatcatatttcccttacaattaataaatgtcacttcatattttataataaaccactcagtaaaagcaaaagcttgtcctgagaagtagagtgagttctttttcactctgtgtctaataatgttaaggtgggaaaaaaaaaagtgtggcatagctacctgcccatccccaaccctcagcaaagtagaatctcttttctggtaattttgggtttccgctctgggctctggcaagttgaacaatcctagccattgacaatcgtgatagttattattttcccatttgctgtctttttgtatctaaagtcttcctattgtactgcacaaaccatggattgtacatatttttatatattatgtcttattttattatttctaaataaaaaaattaaaaattgaaaa

SEQ ID NO: 840 - DNA, 2209 bp, Homo sapiens
gcacacgaatgcgggcgcacacgaatgcgggcgcacacgaatgcgggcgcacccttgagtcccctccacaaccgcggtttgatcccagcggtccagtcggccggtgctgcccatccgtcccgccccctagacgcacgtccgctcgcccggcgcccgagccagtccgcgcgcacgccgtctgcgccccgaaagccccgccccaaggcgcgcccgcccaccgctctccacgtgctcgctggagggcggtgcgaggggccgagccgacaagatgttcttgctgcctcttccggctgcggggcgagtagtcgtccgacgtctggccgtgagacgtttcgggagccggagtctctccaccgcagacatgacgaagggccttgttttaggaatctattccaaagaaaaagaagatgatgtgccacagttcacaagtgcaggagagaattttgataaattgttagctggaaagctgagagagactttgaacatatctggaccacctctgaaggcagggaagactcgaaccttttatggtctgcatcaggacttccccagcgtggtgctagttggcctcggcaaaaaggcagctggaatcgacgaacaggaaaactggcatgaaggcaaagaaaacatcagagctgctgttgcagcggggtgcaggcagattcaagacctggagctctcgtctgtggaggtggatccctgtggagacgctcaggctgctgcggagggagcggtgcttggtctctatgaatacgatgacctaaagcaaaaaaagaagatggctgtgtcggcaaagctctatggaagtggggatcaggaggcctggcagaaaggagtcctgtttgcttctgggcagaacttggcacgccaattgatggagacgccagccaatgagatgacgccaaccagatttgctgaaattattgagaagaatctcaaaagtgctagtagtaaaaccgaggtccatatcagacccaagtcttggattgaggaacaggcaatgggatcattcctcagtgtggccaaaggatctgacgagcccccagtcttcttggaaattcactacaaaggcagccccaatgcaaacgaaccacccctggtgtttgttgggaaaggaattacctttgacagtggtggtatctccatcaaggcttctgcaaatatggacctcatgagggctgacatgggaggagctgcaactatatgctcagccatcgtgtctgctgcaaagcttaatttgcccattaatattataggtctggcccctctttgtgaaaatatgcccagcggcaaggccaacaagccgggggatgttgttagagccaaaaacgggaagaccatccaggttgataacactgatgctgaggggaggctcatactggctgatgcgctctgttacgcacacacgtttaacccgaaggtcatcctcaatgccgccaccttaacaggtgccatggatgtagctttgggatcaggtgccactggggtctttaccaattcatcctggctctggaacaaactcttcgaggccagcattgaaacaggggaccgtgtctggaggatgcctctcttcgaacattatacaagacaggttgtagattgccagcttgctgatgttaacaacattggaaaatacagatctgcaggagcatgtacagctgcagcattcctgaaagaattcgtaactcatcctaagtgggcacatttagacatagcaggcgtgatgaccaacaaagatgaagttccctatctacggaaaggcatgactgggaggcccacaaggactctcattgagttcttacttcgtttcagtcaagacaatgcttagttcagatactcaaaaatgtcttcactctgtcttaaattggacagttgaacttaaaaggtttttgaataaatggatgaaaatcttttaacggagacaaaggatggtatttaaaaatgtagaacacaatgaaatttgtatgccttgatttttttttcatttcacacaaagatttataaaggtaaagttaatatcttacttgataaggatttttaagatactctataaatgattaaaatttttagaacttcctaatcacttttcagagtatatgtttttcattgagaagcaaaattgtaactcagatttgtgatgctaggaacatgagcaaactgaaaattactatgcacttgtcagaaacaataaatgcaacttgttgtgctc

SEQ ID NO: 841 - DNA, 859 bp, Homo sapiens
atacaggcccccaccatgaagggtttcacagccactctcttcctctggactctgatttttcccagctgcagtggaggcggcggtgggaaagcctggcccacacacgtggtctgtagcgacagcggcttggaagtgctctaccagagttgcgatccattacaagattttggcttttctgttgaaaagtgttccaagcaattaaaatcaaatatcaacattagatttggaattattctgagagaggacatcaaagagctttttcttgacctagctctcatgtctcaaggctcatctgttttgaatttctcctatcccatctgtgaggcggctctgcccaagttttctttctgtggaagaaggaaaggagagcagatttactatgctgggcctgtcaataatcctgaatttactattcctcagggagaataccaggttttgctggaactgtacactgaaaaacggtccaccgtggcctgtgccaatgctactatcatgtgctcctgactgtggcctgtagcaaaaatcacagccagctgcatctcgtgggacctccaagctcctctgactgaacctactgtgggaggagaagcagctgatgacagagagaggctctacaaagaagcgcccccaaagagtgcagctgctaattttagtcccaggaccagacatccccagactccacagatgtaatgaagtccccgaatgtatctgtttctaaggagcctcttggcagtccttaagcagtcttgagggtccatcctttttctctaattggtcgcctcccaccagactcacctgcttttcaactttttaggagtgcttcctcacagttaccaagaataaagaaagctggccacca

SEQ ID NO: 842 - DNA, 1754 bp, Homo sapiens
ctggcatccctctaacccaggaggagcgtggggaaaggggctgtgggcctctcggggagcgagctgcgggtagcggcgcactgggtacaggcgcgcgcttggctgtcgcctctgccgctgtgtttgggaggactcgaactggcgccaggaaatattaggaagctgtgattttcaaagctaattatgaaaacatttatcattggaatcagtggtgtgacaaacagtggcaaaacaacactggctaagaatttgcagaaacacctcccaaattgcagtgtcatatctcaggatgatttcttcaagccagagtctgagatagagacagataaaaatggatttttgcagtacgatgtgcttgaagcacttaacatggaaaaaatgatgtcagccatttcctgctggatggaaagcgcaagacactctgtggtatcaacagaccaggaaagtgctgaggaaattcccattttaatcatcgaaggttttcttctttttaattataagccccttgacactatatggaatagaagctatttcctgactattccatatgaagaatgtaaaaggaggaggagtacaagggtctatcagcctccagactctccgggatactttgatggccatgtgtggcccatgtatctaaagtacagacaagaaatgcaggacatcacatgggaagttgtgtacctggatggaacaaaatctgaagaggacctctttttgcaagtatatgaagatctaatacaagaactagcaaagcaaaagtgtttgcaagtgacagcataaagacggaacacaacaaatccttcctgaagtgaattaggaaactccaaggagtaatttaagaaccttcaccaagatacaatgtatactgtggtacaatgacagccattgtttcatatgtttgatttttattgcacatggttttcccaacatgtggaacaataaatatccatgccaatggacaggactgtaccttagcaagttgctccctctccagggagcgcatagatacagcagagctcacagtgagtcagaaagtctccactttctgaacatagctctataacaatgattgtcaaacttttctaactggagctcagagtaagaaataaagattacatcacaatccaatatctgtggaattcattgtgtatgtttatgtatttgtgtgtaggtgtgtatgtgtgtgtgtgatacatacatacatcaagtatcacaagacattgaccttatatattatgcactgtgatgtttttccgtctttaattataaaaaacatattgatcacaaccacaatttggaaaatgttgctccataccatcccataccaacactcaccacctgcaaataatagcattactaggagctgcagtcacaatgaataaatcaacaattcgctacaagatctaggattatttgtgtattttgttgagtgtgtgtgtgtgtgtgtgtgtgtgtgtgtgtgtgtgttggcgtgtatctaataccattgtatctcattgttgagactttgttacaaatagggtttctggtttctttctcccccctcgtggttcattttgtttttgtcaaaccagtggtctaaaatcacagaaataagcaattacttcaatcatgtggaatccaggggacctatctttggaaagcacagaaggagatctgaattgtgtgatctcttgaggctgctttcaatgctggaatttaaattatgtactgaacaatcttttgcttattaataaaaagattacacacaa

SEQ ID NO: 843 - DNA, 2843 bp, Homo sapiens
agcggctccagctaagaggacaagatgaggcccggcctctcatttctcctagcccttctgttcttccttggccaagctgcaggggatttgggggatgtgggacctccaattcccagccccggcttcagctctttcccaggtgttgactccagctccagcttcagctccagctccaggtcgggctccagctccagccgcagcttaggcagcggaggttctgtgtcccagttgttttccaatttcaccggctccgtggatgaccgtgggacctgccagtgctctgtttccctgccagacaccacctttcccgtggacagagtggaacgcttggaattcacagctcatgttctttctcagaagtttgagaaagaactttccaaagtgagggaatatgtccaattaattagtgtgtatgaaaagaaactgttaaacctaactgtccgaattgacatcatggagaaggataccatttcttacactgaactggacttcgagctgatcaaggtagaagtgaaggagatggaaaaactggtcatacagctgaaggagagttttggtggaagctcagaaattgttgaccagctggaggtggagataagaaatatgactctcttggtagagaagcttgagacactagacaaaaacaatgtccttgccattcgccgagaaatcgtggctctgaagaccaagctgaaagagtgtgaggcctctaaagatcaaaacacccctgtcgtccaccctcctcccactccagggagctgtggtcatggtggtgtggtgaacatcagcaaaccgtctgtggttcagctcaactggagagggttttcttatctatatggtgcttggggtagggattactctccccagcatccaaacaaaggactgtattgggtggcgccattgaatacagatgggagactgttggagtattatagactgtacaacacactggatgatttgctattgtatataaatgctcgagagttgcggatcacctatggccaaggtagtggtacagcagtttacaacaacaacatgtacgtcaacatgtacaacaccgggaatattgccagagttaacctgaccaccaacacgattgctgtgactcaaactctccctaatgctgcctataataaccgcttttcatatgctaatgttgcttggcaagatattgactttgctgtggatgagaatggattgtgggttatttattcaactgaagccagcactggtaacatggtgattagtaaactcaatgacaccacacttcaggtgctaaacacttggtataccaagcagtataaaccatctgcttctaacgccttcatggtatgtggggttctgtatgccacccgtactatgaacaccagaacagaagagattttttactattatgacacaaacacagggaaagagggcaaactagacattgtaatgcataagatgcaggaaaaagtgcagagcattaactataacccttttgaccagaaactttatgtctataacgatggttaccttctgaattatgatctttctgtcttgcagaagccccagtaagctgtttaggagttagggtgaaagagaaaatgtttgttgaaaaaatagtcttctccacttacttagatatctgcaggggtgtctaaaagtgtgttcattttgcagcaatgtttaggtgcatagttctaccacactagagatctaggacatttgtcttgatttggtgagttctcttgggaatcatctgcctcttcaggcgcattttgcaataaagtctgtctagggtgggattgtcagaggtctaggggcactgtgggcctagtgaagcctactgtgaggaggcttcactagaagccttaaattaggaattaaggaacttaaaactcagtatggcgtctagggattctttgtacaggaaatattgcccaatgactagtcctcatccatgtagcaccactaattcttccatgcctggaagaaacctggggacttagttaggtagattaatatctggagctcctcgagggaccaaatctccaacttttttttcccctcactagcacctggaatgatgctttgtatgtggcagataagtaaatttggcatgcttatatattctacatctgtaaagtgctgagttttatggagagaggcctttttatgcattaaattgtacatggcaaataaatcccagaaggatctgtagatgaggcacctgctttttcttttctctcattgtccaccttactaaaagtcagtagaatcttctacctcataacttccttccaaaggcagctcagaagattagaaccagacttactaaccaattccaccccccaccaacccccttctactgcctactttaaaaaaattaatagttttctatggaactgatctaagattagaaaaattaattttctttaatttcattatgaacttttatttacatgactctaagactataagaaaatctgatggcagtgacaaagtgctagcatttattgttatctaataaagaccttggagcatatgtgcaacttatgagtgtatcagttgttgcatgtaatttttgcctttgtttaagcctggaacttgtaagaaaatgaaaatttaatttttttttctaggacgagctatagaaaagctattgagagtatctagttaatcagtgcagtagttggaaaccttgctggtgtatgtgatgtgcttctgtgcttttgaatgactttatcatctagtctttgtctatttttcctttgatgttcaagtcctagtctataggattggcagtttaaatgctttactcccccttttaaaataaatgattaaaatgtgctttgaaaaaa

SEQ ID NO: 844 - DNA, 7694 bp, Homo sapiens
ggagttggcgcggcccctgcagtccggcggagagcggagctgaggatggctgtgcccggctccttcccgctgctggtcgagggctcctggggccccgaccccccgaagaacttgaacaccaagttgcagatgtacttccagagcccgaagaggtcgggaggcggcgagtgtgaggtccgccaggatcccaggagcccatcccgcttcctggtgttcttctacccggaggacgttcggcagaaggttctggagagaaaaaatcatgagttggtatggcaaggaaaaggaacattcaagttaactgtccagttacctgcaaccccagatgaaatcgatcatgtctttgaagaggaacttctaacaaaagaatccaagaccaaagaagatgttaaagaaccagatgtgtcagaagaattggatacaaaactccctcttgatggtggattagacaaaatggaagatatcccagaggaatgtgaaaatatttcctctttggtggcatttgaaaacctcaaggcaaatgtgactgacataatgctaatcttgttagtggagaacataagtggcctgtctaatgatgactttcaagtggaaataataagagattttgatgttgctgttgttacctttcaaaagcacatagatactataagatttgttgatgattgtaccaagcaccattcaattaaacaacttcagctttctccaagacttctggaagtgacaaacacaatcagggttgaaaacctgccacctggtgctgatgactacagtttaaaacttttctttgaaaatccctataatggagggggaagagttgccaatgttgaatattttcctgaagagagttcagctctgattgaattttttgacagaaaagtgttagacaccatcatggccacaaaactcgacttcaataaaatgccactttctgtgttcccatactatgcctcattgggcacagccttgtatggaaaggagaagcctctgatcaagcttccagcaccatttgaagagtcactagatcttcccttatggaagttcttacagaaaaagaatcacctcattgaggagataaacgatgaaatgaggcgttgtcactgtgagctcacgtggtcccaactcagtggtaaagttaccatcagaccagcagccaccttagtcaatgaaggaagaccgagaatcaagacctggcaggcagatacttccacaacactctctagcatcaggtctaaatataaagtcaacccaattaaagtggatccaacaatgtgggacaccataaaaaatgatgtgaaagatgacaggattttgattgagtttgatacacttaaggagatggtaatcttagcagggaaatcagaggatgtccaaagcattgaggtacaagtcagggagttaatagaaagcactactcaaaaaattaaaagggaagagcaaagtttgaaggaaaaaatgatcatttctccaggcaggtattttcttttgtgtcacagcagtctactggaccatttactcacggagtgcccagagatagagatttgttacgatagagtcactcaacacttgtgcttgaaaggacctagtgcagatgtgtataaagcaaagtgtgaaatccaggaaaaggtgtacaccatggctcagaaaaacattcaggtttctcctgagatttttcagtttttgcaacaggtaaactggaaagaattctctaagtgtcttttcatagcacagaagattcttgcactttatgagctagagggtacaactgttctcttaaccagctgttcttctgaagccctgttagaagcagaaaagcaaatgctcagtgccttaaattataagcgcattgaagttgagaacaaagaagttcttcatggcaagaaatggaaagggctcactcacaatttgcttaagaaacaaaattcctccccaaacactgtaatcatcaatgagttaacttcagaaaccacagctgaagtcatcattacaggctgtgtaaaagaagtaaatgaaacctataaattgctttttaacttcgttgaacaaaacatgaaaatagagagactggttgaagtaaagccttccttagttattgactatttaaagacagaaaagaagctattctggccaaagataaagaaggtaaatgtgcaggtaagtttcaatcctgagaacaaacaaaaaggcattttactaactggctcaaagaccgaagtactgaaggcagtggacattgtcaagcaagtctgggattcagtctgtgttaaaagtgtccatactgataagccaggagccaagcagttcttccaggataaagcacggttttatcaaagtgagatcaaacggttgtttggttgttacattgaactacaggagaatgaagtaatgaaggagggaggcagccccgctgggcagaagtgcttctctcggacagtcttggcccctggcgttgtgctgattgtgcagcagggtgacttggcacggcttcctgtcgatgtggtggtgaatgcatctaatgaggaccttaagcattatggtggcctggccgctgcgctctcaaaagcagctggccctgagctccaggccgactgtgaccagatagtgaagagagagggcagactcctaccgggcaatgccaccatctccaaggcaggaaagctgccctaccaccacgtgatccatgcagtggggccccgctggagcggatatgaggccccgaggtgtgtgtacctattaaggagagctgtgcaactcagtctctgtctagccgaaaaatacaagtaccgatccatagccatcccagctattagttctggagtctttggctttcccttaggccgatgcgtggagaccattgtttctgccatcaaggaaaacttccaattcaagaaggatggacactgcttgaaagaaatctaccttgtggatgtatctgagaagactgttgaggcctttgcagaagctgtgaaaactgtatttaaagccaccctgccagatacagctgccccgccaggtttaccaccagcagcagcggggcctgggaaaacatcatgggaaaaaggaagcctggtgtccccgggaggcctgcagatgctgttggtgaaagagggtgtgcagaatgctaagaccgatgttgttgtcaactccgttcccttggatctcgtgcttagtagagggcctctttctaagtccctcttggaaaaagctggaccagagctccaggaggaattggacacagttggacaaggggtggctgtcagcatgggcacagtgctcaaaaccagcagctggaatctggactgtcgctatgtgcttcacgtggtagctccggagtggagaaatggtagcacatcttcactcaagataatggaagacataatcagagaatgtatggagatcactgagagcttgtccttaaaatcaattgcatttccagcaataggaacaggaaacttgggatttcctaaaaacatattcgctgaattaatcatttcagaggtgttcaaatttagtagcaagaatcagctgaaaactttacaagaggttcactttctgctgcacccgagtgatcatgaaaatattcaggcattttcagatgaatttgccagaagggctaatggaaatctcgtcagtgacaaaattccgaaggctaaagatacacaaggtttttatgggactgtttctagccctgattcaggtgtgtatgaaatgaagattggctccatcatcttccaggtggcttctggagatatcacgaaagaagaggcagatgtgattgtaaattcaacatcaaactcattcaatctcaaagcaggggtctccaaagcaattttagaatgtgctggacaaaatgtagaaagggaatgttctcagcaagctcagcagcgcaaaaatgattatataatcaccggaggtggatttttgaggtgcaagaatatcattcatgtaattggtggaaatgatgtcaagagttcagtttcctctgttttgcaggagtgtgaaaaaaaaaattactcatccatttgcctcccagccattgggacaggaaatgccaaacaacacccagataaggttgctgaagccataattgatgccattgaagactttgtccagaaaggatcagcccagtctgtgaaaaaagttaaagttgttatctttctgcctcaagtactggatgtgttttatgccaacatgaagaaaagagaagggactcagctttcttcccaacagtctgtgatgtctaaacttgcatcatttttgggcttttcaaagcaatctccccaaaaaaagaatcatttggttttggaaaagaaaacagaatcagcaacttttcgggtgtgtggtgaaaatgtcacgtgtgtggaatatgctatctcctggctacaagacctgattgaaaaagaacagtgtccttacaccagtgaagatgagtgcatcaaagactttgatgaaaaggagtatcaggagttgaatgagctgcagaagaagttaaatattaacatttccctggaccataagagacctttgattaaggttttgggaattagcagagatgtgatgcaggctagagatgaaattgaggcgatgatcaagagagttcgattggccaaagaacaggaatcccgggcagattgtatcagtgagtttatagaatggcagtataatgacaataacacttctcattgttttaacaaaatgaccaatctgaaattagaggatgcaaggagagaaaagaaaaaaacagttgatgtcaaaattaatcatcggcactacacagtgaacttgaacacatacactgccacagacacaaagggccacagtttatctgttcagcgcctcacgaaatccaaagttgacatccctgcacactggagtgatatgaagcagcagaatttctgtgtggtggagctgctgcctagtgatcctgagtacaacacggtggcaagcaagtttaatcagacctgctcacacttcagaatagagaagattgagaggatccagaatccagatctctggaatagctaccaggcaaagaaaaaaactatggatgccaagaatggccagacaatgaatgagaagcaactcttccatgggacagatgccggctccgtgccacacgtcaatcgaaatggctttaaccgcagctatgccggaaagaatgctgtggcatatggaaagggaacctattttgctgtcaatgccaattattctgccaatgatacgtactccagaccagatgcaaatgggagaaagcatgtgtattatgtgcgagtacttactggaatctatacacatggaaatcattcattaattgtgcctccttcaaagaaccctcaaaatcctactgacctgtatgacactgtcacagataatgtgcaccatccaagtttatttgtggcattttatgactaccaagcatacccagagtaccttattacgtttagaaaataacactttggtatccttcccacaaaattattctccatttgtacatatctagttgtaaaacaagttttagcttttttttttaattcctcttaacagatttttctaatatccaaggatcattctttgtcgctgaagtcagtctttcttcagcttccctttcataatggaaatgaacttattatcttgagagcaaataacttggaaaatttaaatgagataatgcagttgcaactgtgtgtccacaagtatggacatcaaatctgtgggaaaagaacaggtttgtattttcaggaaggagagaataacagtcttatagacagagggcacagctaagcacagctgccactgcaggagacaggccccatgtcaggatgccatagtgctgtggggagcacagtattacccagtgggtagggcttctgtcttccctgggagcagggatggtatcttagtcaatttttttcccttgagatgaggtctgtgcctgatgtacaacggatactccataaatgtttgacaaaccaacgaagaatgaaaaaaagcctagtcagactcccatccaaagtaggaactatctctttaacattcttgactcactatcactttacctcaaattgaacagattccatgacggaacttcattcttcacaaactagccagtgacatgtgggacagctctggccagggctctgggactgcagtgtacttgcgctctgcacggtccaggagctgtgatgtggctgtggtctaggggaatcctgcctgccccatggagttgcgcagcacaaccctggctccaattgccagaaggctctttttaatgctgaaccaaaatgtgcctttttttttttttttttgagatggagtttcactcttgttgcccaggctggagtgcaatggcgcgatctcagctcactgcagccactgcctcccaggttcaagtgattctcctgcctcagcctcccgagtagctgggattacaggcatgcgctaacacacccagctaattttgtatttttagtagagacgaggtttctccatgttcgacaggctggtctcgaactcccacctcagcctcccaaactgctgggattacaggtgtgagccaccgtgaccagccaatgtgccttcttatagtgtctactcattggtctttgttctgcccagtgataacaatgggataacgcctgctacacatcttcattgtgaaacccttcccctgtgctgagattaaatgaactctaagattattaaatagtatattttccttgacagcctagcgtttgatgattttaaagccttatgtataaataaaccaaaggaagtaagcagtcatattgctaatttgctaactcctatctattgaatggtgaagttttaaaaatttccccaggtaagtttaagattcaaacaccatctattgagcacctacattgtgtgccaggtagtaaaataggtgctttcatacacattgtctcaattcctgtgaggtcagaattatctctgcatttgaaacttgaggaaacatgctcagagtgcaagaagcttccttgcctgagatcacctagaaaggaaccctcagagccggcaactgaatcttggtccctgtgatgtcaagcccattgctctcccactgcagaacatggcctctagattaatgccaccgattcaggaacacctccgacagtcttgaaatacccccatgttgccttgtttgttttttccttctggcttcttctattacagtctcttcattggaagctctgtaggccaaggccagagctgatactgacacggagccaatgcagatagcacatcagatgctaggggtcgctgggaggattaagggacttaatctgctaggaacacctgtacttgaagtggaggaggctagggggccacagttgctgcttcattaacatagaggttttggatttttttctcttgtggtttgttttttaagtggattggcagactccttgttgcttaagagtggctttctaggcaggccactggcatctgaattcatcattgacaataaatgtaagaaattggaataaaaaagagagacctgctgttattcgcttttgttctccagtgatttgattaactcagggcaaggctgaatatcagagtgtatcgcactgaagaataataatccattcagtaatgttatagttatcctcaatctaaatatgtcaactgtcattttgctacttttcaaataaaatacttgaaaactgtca

SEQ ID NO: 845 - DNA, 4531 bp, Homo sapiens
agaggacgagagaagagctgaggggcgcgtcgccagcgcctgtgtctccctggcgcgggttccccaggctagcccgctggcccgtccgcgcgcgcgcccccggcccgcgcgccccttcccggggctcctggcctcgcctcagcggctgcaggctcttcgtcgcgggccgggctgcacgcgagcgccctccgggcagactttcgtcccccacccccgggagcgcggaaggctcactcgcagcgcatggtctacccgcgccgggcggagccccggcgtccagagcgctgcggccgcggcggtgcagcagaggcgcctcgggcaggaggagggcggcttctgcgagggcagcctgaggtattaaaaagtgtcagcaaactgcattgaataacagacatcctaagaggggatattttccacctctataatgaagaaaagcaggagtgtgatgacggtgatggctgatgataatgttaaagattattttgaatgtagcttgagtaaatcctacagttcttccagtaacacacttgggatcgacctctggagagggagaaggtgttgctcaggaaacttacagttaccaccactgtctcaaagacagagtgaaagggcaaggactcctgagggagatggtatttccaggccgaccacactgcctttgacaacgcttccaagcattgctattacaactgtaagccaggagtgctttgatgtggaaaatggcccttccccaggtcggagtccactggatccccaggccagctcttccgctgggctggtacttcacgccacctttcctgggcacagccagcgcagagagtcatttctctacagatcagacagcgactatgacttgtcaccaaaggcgatgtcgagaaactcttctcttccaagcgagcaacacggcgatgacttgattgtaactccttttgcccaggtccttgccagcttgcgaagtgtgagaaacaacttcactatactgacaaaccttcatggtacatctaacaagaggtccccagctgctagtcagcctcctgtctccagagtcaacccacaagaagaatcttatcaaaaattagcaatggaaacgctggaggaattagactggtgtttagaccagctagagaccatacagacctaccggtctgtcagtgagatggcttctaacaagttcaaaagaatgctgaaccgggagctgacacacctctcagagatgagccgatcagggaaccaggtgtctgaatacatttcaaatactttcttagacaagcagaatgatgtggagatcccatctcctacccagaaagacagggagaaaaagaaaaagcagcagctcatgacccagataagtggagtgaagaaattaatgcatagttcaagcctaaacaatacaagcatctcacgctttggagtcaacactgaaaatgaagatcacctggccaaggagctggaagacctgaacaaatggggtcttaacatctttaatgtggctggatattctcacaatagacccctaacatgcatcatgtatgctatattccaggaaagagacctcctaaagacattcagaatctcatctgacacatttataacctacatgatgactttagaagaccattaccattctgacgtggcatatcacaacagcctgcacgctgctgatgtagcccagtcgacccatgttctcctttctacaccagcattagacgctgtcttcacagatttggagatcctggctgccatttttgcagctgccatccatgacgttgatcatcctggagtctccaatcagtttctcatcaacacaaattcagaacttgctttgatgtataatgatgaatctgtgttggaaaatcatcaccttgctgtgggtttcaaactgctgcaagaagaacactgtgacatcttcatgaatctcaccaagaagcagcgtcagacactcaggaagatggttattgacatggtgttagcaactgatatgtctaaacatatgagcctgctggcagacctgaagacaatggtagaaacgaagaaagttacaagttcaggcgttcttctcctagacaactataccgatcgcattcaggtccttcgcaacatggtacactgtgcagacctgagcaaccccaccaagtccttggaattgtatcggcaatggacagaccgcatcatggaggaatttttccagcagggagacaaagagcgggagaggggaatggaaattagcccaatgtgtgataaacacacagcttctgtggaaaaatcccaggttggtttcatcgactacattgtccatccattgtgggagacatgggcagatttggtacagcctgatgctcaggacattctcgataccttagaagataacaggaactggtatcagagcatgatacctcaaagtccctcaccaccactggacgagcagaacagggactgccagggtctgatggagaagtttcagtttgaactgactctcgatgaggaagattctgaaggacctgagaaggagggagagggacacagctatttcagcagcacaaagacgctttgtgtgattgatccagaaaacagagattccctgggagagactgacatagacattgcaacagaagacaagtcccccgtggatacataatccccctctccctgtggagatgaacattctatccttgatgagcatgccagctatgtggtagggccagcccaccatgggggccaagacctgcacaggacaagggccacctggcctttcagttacttgagtttggagtcagaaagcaagaccaggaagcaaatagcagctcaggaaatcccacggttgacttgccttgatggcaagcttggtggagagggctgaagctgttgctgggggccgattctgatcaagacacatggcttgaaaatggaagacacaaaactgagagatcattctgcactaagtttcgggaacttatccccgacagtgactgaactcactgactaataacttcatttatgaatcttctcacttgtccctttgtctgccaacctgtgtgccttttttgtaaaacattttcatgtctttaaaatgcctgttgaatacctggagtttagtatcaacttctacacagataagctttcaaagttgacaaacttttttgactctttctggaaaagggaaagaaaatagtcttccttctttcttgggcaatatccttcactttactacagttacttttgcaaacagacagaaaggatacacttctaaccacattttacttccttcccctgttgtccagtccaactccacagtcactcttaaaacttctctctgtttgcctgcctccaacagtacttttaactttttgctgtaaacagaataaaattgaacaaattagggggtagaaaggagcagtggtgtcgttcaccgtgagagtctgcatagaactcagcagtgtgccctgctgtgtcttggaccctgccccccacaggagttgtacagtccctggccctgttccctacctcctctcttcaccccgttaggctgttttcaatgtaatgctgccgtccttctcttgcactgccttctgcgctaacacctccattcctgtttataaccgtgtatttattacttaatgtatataatgtaatgttttgtaagttattaatttatatatctaacattgcctgccaatggtggtgttaaatttgtgtagaaaactctgcctaagagttacgactttttcttgtaatgttttgtattgtgtattatataacccaaacgtcacttagtagagacatatggcccccttggcagagaggacaggggtgggcttttgttcaaagggtctgccctttccctgcctgagttgctacttctgcacaacccctttatgaaccagttttggaaacaatattctcacattagatactaaatggtttatactgagcttttacttttgtatagcttgataggggcagggggcaatgggatgtagtttttacccaggttctatccaaatctatgtgggcatgagttgggttataactggatcctactatcattgtggctttggttcaaaaggaaacactacatttgctcacagatgattcttctgaatgctcccgaactactgactttgaagaggtagcctcctgcctgccattaagcaggaatgtcatgttccagttcattacaaaagaaaacaataaaacaatgtgaatttttataataaaatgtgaactgatgtagcaaattacgcaaatgtgaagcctcttctgataacacttgttaggcctcttactgatgtcagtttcagtttgtaaaatatgtttcatgctttcagttcagcattgtgactcagtaattacagaaaatggcacaaatgtgcatgaccaatgtatgtctatgaacactgcattgtttcaggtggacattttatcattttcaaatgtttctcacaatgtatgttatagtattattattatatattgtgttcaaatgcattctaaagagacttttatatgaggtgaataaagaaaagcatgatta

SEQ ID NO: 846 - DNA, 4676 bp, Homo sapiens
ggagcttccactcggctgcgggctggagcggcggcgggcaggcgtgcggaggacactcctgcgaccaggtactggctgtgatcgaacttctcaaccctcagagacttagatcttccacctcactccctcagccaagcctccaggccccctcgtgcatccgtggtggcctctctgccttctctgttctgttctccccatggcccagacatgagtggccccctagaaggggctgatgggggaggggaccccaggcctggggaatcattttgtcctgggggcgtcccatcccctgggcccccacagcaccggccttgcccaggccccagcctggccgatgacaccgatgccaacagcaatggttcaagtggcaatgagtccaacgggcatgagtctagaggcgcatctcagcggagctcacacagctcctcctcaggcaacggcaaggactcagccctgctggagaccactgagagcagcaagagcacaaactctcagagcccatccccacccagcagttccattgcctacagcctcctgagtgccagctcagagcaggacaacccgtccaccagtggctgcagcagtgaacagtcagcccgggcaaggactcagaaggaactcatgacagcacttcgagagctcaagcttcgactgccgccagagcgccggggcaagggccgctctgggaccctggccacgctgcagtacgcactggcctgtgtcaagcaggtgcaggccaaccaggaatactaccagcagtggagcctggaggagggcgagccttgctccatggacatgtccacctataccctggaggagctggagcacatcacgtctgagtacacacttcagaaccaggataccttctcagtggctgtctccttcctgacgggccgaatcgtctacatttcggagcaggcagccgtcctgctgcgttgcaagcgggacgtgttccggggtacccgcttctctgagctcctggctccccaggatgtgggagtcttctatggttccactgctccatctcgcctgcccacctggggcacaggggcctcagcaggttcaggcctcagggactttacccaggagaagtccgtcttctgccgtatcagaggaggtcctgaccgggatccagggcctcggtaccagccattccgcctaaccccgtatgtgaccaagatccgggtctcagatggggcccctgcacagccgtgctgcctgctgattgcagagcgcatccattcgggttacgaagctccccggataccccctgacaagaggattttcactacgcggcacacacccagctgcctcttccaggatgtggatgaaagggctgcccccctgctgggctacctgccccaggacctcctgggggccccagtgctcctgttcctgcatcctgaggaccgacccctcatgctggctatccacaagaagattctgcagttggcgggccagccctttgaccactcccctatccgcttctgtgcccgcaacggggagtatgtcaccatggacaccagctgggctggctttgtgcacccctggagccgcaaggtagccttcgtgttgggccgccacaaagtacgcacggcccccctgaatgaggacgtgttcactcccccggcccccagcccagctccctccctggacactgatatccaggagctgtcagagcagatccaccggctgctgctgcagcccgtccacagccccagccccacgggactctgtggagtcggcgccgtgacatccccaggccctctccacagccctgggtcctccagtgatagcaacgggggtgatgcagaggggcctgggcctcctgcgccagtgactttccagcagatctgtaaggatgtgcatctggtgaagcaccagggccagcagctttttattgagtctcgggcccggcctcagtcccggccccgcctccctgctacaggcacgttcaaggccaaggcccttccctgccaatccccagacccagagctggaggcgggttctgctcccgtccaggccccactagccttggtccctgaggaggccgagaggaaagaagcctccagctgctcctaccagcagatcaactgcctggacagcatcctcaggtacctggagagctgcaacctccccagcaccactaagcgtaaatgtgcctcctcctcctcctataccacctcctcagcctctgacgacgacaggcagaggacaggtccagtctctgtggggaccaagaaagatccgccgtcagcagcgctgtctggggagggggccaccccacggaaggagccagtggtgggaggcaccctgagcccgctcgccctggccaataaggcggagagtgtggtgtccgtcaccagtcagtgtagcttcagctccaccatcgtccatgtgggagacaagaagcccccggagtcggacatcatcatgatggaggacctgcctggcctagccccaggcccagcccccagcccagcccccagccccacagtagcccctgacccagccccagacgcctaccgtccagtggggctgaccaaggccgtgctgtccctgcacacacagaaggaagagcaagccttcctcagccgcttccgagacctgggcaggctgcgtggactcgacagctcttccacagctccctcagcccttggcgagcgaggctgccaccacggccccgcacccccaagccgccgacaccactgccgatccaaagccaagcgctcacgccaccaccagaaccctcgggctgaagcgccctgctatgtctcacacccctcacccgtgccaccctccaccccctggcccaccccaccagccactacccccttcccagcggttgtccagccctaccctctcccagtgttctctcctcgaggaggcccccagcctcttccccctgctcccacatctgtgcccccagctgctttccccgcccctttggtgaccccaatggtggccttggtgctccctaactatctgttcccaaccccatccagctatccttatggggcactccagacccctgctgaagggcctcccactcctgcctcgcactccccttctccatccttgcccgccctcgccccgagtcctcctcaccgcccggactctccactgttcaactcgagatgcagctctccactccagctcaatctgctgcagctggaggagctcccccgtgctgagggggctgctgttgcaggaggccctgggagcagtgccgggcccccacctcccagtgcggaggctgctgagccagaggccagactggcggaggtcactgagtcctccaatcaggacgcactttccggctccagtgacctgctcgaacttctgctgcaagaggactcgcgctccggcacaggctccgcagcctcgggctccttgggctctggcttgggctctgggtctggttcaggctcccatgaagggggcagcacctcagccagcatcactcgcagcagccagagcagccacacaagcaaatactttggcagcatcgactcttccgaggctgaggctggggctgctcggggcggggctgagcctggggaccaggtgattaagtacgtgctccaggatcccatttggctgctcatggccaatgctgaccagcgcgtcatgatgacctaccaggtgccctccagggacatgacctctgtgctgaagcaggatcgggagcggctccgagccatgcagaagcagcagcctcggttttctgaggaccagcggcgggaactgggtgctgtgcactcctgggtccggaagggccaactgcctcgggctcttgatgtgatggcctgtgtggactgtgggagcagcacccaagatcctggtcaccctgatgacccactcttctcagagctggatggactggggctggagcccatggaagagggtggaggcgagcagggcagcagcggtggcggcagtggtgagggagagggctgcgaggaggcccaaggcggggccaaggcttcaagctctcaggacttggctatggaggaggaggaagaaggcaggagctcatccagtccagccttacctacagcaggaaactgcaccagctagactccattctgggaccatctccaggagtccatgagaggctttcttctcctatgtcccaattctcagaactcagatgtggctagaccaaccagtgggaaactgccccagcttctcccaccatagggggccggacccccatcaccagcctaggatccaggggctgcctctggcctcttagggagcagagagcagaactccgcagcccagcccagaggagtgtcacctcccacctttggagaggaatccttccctcccctggacaaagttgctgacaagctgctgaagtggcctctccatattccagctgagcctgaatctgactcttgagggttggggctgcacttatttattgcggggagacagctctctctcccacctcctccccagatgggaggagagcctgaggcccaagcaggacccgggggttccagcccctagctgctctggagtgggggaggttggtggaccatggagtccctggtgctgcccctcaggtgggacccaggcgttctcagctgtaccctctgccgatggcatttgtgtttttgatatttgtgtctgttactacttttttaatacaaaaagataaaaacgcc

SEQ ID NO: 847 - DNA, 1707 bp, Homo sapiens
aggccaggctcgtgccgttttgcagacgccaccgccgaggaaaaccgtgtactattagccatggtcaaccccaccgtgttcttcgacattgccgtcgacggcgagcccttgggccgcgtctcctttgaggtaaggggcctggataccaagaagtgactgctcatctaatccataaagctatgttaacagattggagctgtttgcagacaaggtcccaaagacagcagaaaattttcgtgctctgagcactggagagaaaggatttggttataagggttcctgctttcacagaattattccagggtttatgtgtcagggtggtgacttcacacgccataatggcactggtggcaagtccatctatggggagaaatttgaagatgagaacttcatcctaaagcatacgggtcctggcatcttgtccatggcaaatgctggacccaacacaaatggttcccagtttttcatctgcactgccaagactgagtggttggatggcaagcatgtggtgtttggcaaagtgaaagaaggcatgaatattgtggaggccatggagcgctttgggtccaggaatggcaagaccagcaagaagatcaccattgctgactgtggacaactcgaataagtttgacttgtgttttatcttaaccaccagatcattccttctgtagctcaggagagcacccctccaccccatttgctcgcagtatcctagaatctttgtgctctcgctgcagttccctttgggttccatgttttccttgttccctcccatgcctagctggattgcagagttaagtttatgattatgaaataaaaactaaataacaattgtcctcgtttgagttaagagtgttgatgtaggctttattttaagcagtaatgggttacttctgaaacatcacttgtttgcttaattctacacagtacttagattttttttactttccagtcccaggaagtgtcaatgtttgttgagtggaatattgaaaatgtaggcagcaactgggcatggtggctcactgtctgtaatgtattacctgaggcagaagaccacctgagggtaggagtcaagatcagcctgggcaacatagtgagacgctgtctctacaaaaaataattagcctggcctggtggtgcatgcctagtcctagctgatctggaggctgacgtgggaggattgcttgagcctagagtgagctattatcatgccactgtacagcctgggtgttcacagatcttgtgtctcaaaggtaggcagaggcaggaaaagcaaggagccagaattaagaggttgggtcagtctgcagtgagttcatgcatttagaggtgttcttcaagatgactaatgtcaaaaattgagacatctgttgcggttttttttttttttttttcccctggaatgcagtggcgtgatctcagctcactgcagcctccgcctcctgggttcaagtgattctagtgcctcagcctcctgagtagctgggataacgggcgtgtgccaccatgcccagctaatttttgtatttttagtatagatggggtttcatcattttgaccaggctggtctcaaactcttgacctcagctgatgcgcctgccttggcctcccaaactgctgagattacagatgtgagccaccgcaccctacctcattttctgtaacaaagctaagcttgaacactgttgatgttcttgagggaagcat

SEQ ID NO: 848 - DNA, 893 bp, Homo sapiens
ctcagctgtccgggctgctttcgcctccgcctgtggatgctgcgcctctccgaacgcaacatgaaggtgctccttgccgccgccctcatcgcggggtccgtcttcttcctgctgctgccgggaccttctgcggccgatgagaagaagaaggggcccaaagtcaccgtcaaggtgtattttgacctacgaattggagatgaagatgtaggccgggtgatctttggtctcttcggaaagactgttccaaaaacagtggataattttgtggccttagctacaggagagaaaggatttggctacaaaaacagcaaattccatcgtgtaatcaaggacttcatgatccagggcggagacttcaccaggggagatggcacaggaggaaagagcatctacggtgagcgcttccccgatgagaacttcaaactgaagcactacgggcctggctgggtgagcatggccaacgcaggcaaagacaccaacggctcccagttcttcatcacgacagtcaagacagcctggctagatggcaagcatgtggtgtttggcaaagttctagagggcatggaggtggtgcggaaggtggagagcaccaagacagacagccgggataaacccctgaaggatgtgatcatcgcagactgcggcaagatcgaggtggagaagccctttgccatcgccaaggagtagggcacagggacatctttctttgagtgaccgtctgtgcaggccctgtagtccgccacagggctctgagctgcactggccccggtgctggcatctggtggagcggacccactcccctcacattccacaggcccatggactcacttttgtaacaaactcctaccaacactgaccaataaaaaaaaatgtgggtttttttttttttaata

SEQ ID NO: 849 - DNA, 3431 bp, Homo sapiens
acagagggtggaaaggcgagagcggagctccaagcccggcagcccgagaggaagatgaacagccccaggccagagcctctggcagagtggaccccgagccgcccccaggtagccaggagcggcctcagcggcagccgcaaactccagtagccgcccgtgctgcccgtggctggggcggagggcagccagagctggggaccaaggctccgcgccacctgcgcgcacagcctcacacctgaacgctgtcctcccgcagacgagaccggcgggcactgcaaagctgggactcgtctttgaaggaaaaaaaatagcgagtaagaaatccagcaccattcttcactgacccatcccgctgcacctcttgtttcccaagtttttgaaagctggcaactctgacctcggtgtccaaaaatcgacagccactgagaccggctttgagaagccgaagatttggcagtttccagactgagcaggacaaggtgaaagcaggttggaggcgggtccaggacatctgagggctgaccctgggggctcgtgaggctgccaccgctgctgccgctacagacccagccttgcactccaaggctgcgcaccgccagccactatcatgtccactcccggggtcaattcgtccgcctccttgagccccgaccggctgaacagcccagtgaccatcccggcggtgatgttcatcttcggggtggtgggcaacctggtggccatcgtggtgctgtgcaagtcgcgcaaggagcagaaggagacgaccttctacacgctggtatgtgggctggctgtcaccgacctgttgggcactttgttggtgagcccggtgaccatcgccacgtacatgaagggccaatggcccgggggccagccgctgtgcgagtacagcaccttcattctgctcttcttcagcctgtccggcctcagcatcatctgcgccatgagtgtcgagcgctacctggccatcaaccatgcctatttctacagccactacgtggacaagcgattggcgggcctcacgctctttgcagtctatgcgtccaacgtgctcttttgcgcgctgcccaacatgggtctcggtagctcgcggctgcagtacccagacacctggtgcttcatcgactggaccaccaacgtgacggcgcacgccgcctactcctacatgtacgcgggcttcagctccttcctcattctcgccaccgtcctctgcaacgtgcttgtgtgcggcgcgctgctccgcatgcaccgccagttcatgcgccgcacctcgctgggcaccgagcagcaccacgcggccgcggccgcctcggttgcctcccggggccaccccgctgcctccccagccttgccgcgcctcagcgactttcggcgccgccggagcttccgccgcatcgcgggcgccgagatccagatggtcatcttactcattgccacctccctggtggtgctcatctgctccatcccgctcgtggtgcgagtattcgtcaaccagttatatcagccaagtttggagcgagaagtcagtaaaaatccagatttgcaggccatccgaattgcttctgtgaaccccatcctagacccctggatatatatcctcctgagaaagacagtgctcagtaaagcaatagagaagatcaaatgcctcttctgccgcattggcgggtcccgcagggagcgctccggacagcactgctcagacagtcaaaggacatcttctgccatgtcaggccactctcgctccttcatctcccgggagctgaaggagatcagcagtacatctcagaccctcctgccagacctctcactgccagacctcagtgaaaatggccttggaggcaggaatttgcttccaggtgtgcctggcatgggcctggcccaggaagacaccacctcactgaggactttgcgaatatcagagacctcagactcttcacagggtcaggactcagagagtgtcttactggtggatgaggctggtgggagcggcagggctgggcctgcccctaaggggagctccctgcaagtcacatttcccagtgaaacactgaacttatcagaaaaatgtatataataggcaaggaaagaaatacagtactgtttctggacccttataaaatcctgtgcaatagacacatacatgtcacatttagctgtgctcagaagggctatcatcatcctacaactcacattagagaacatcctggcttttgagcacttttcaaacaatcaagttgactcacgtgggtcctgaggcctgcagcacgtcggatgctaccccactatgacagaggattgtggtcacaacttgatggctgcgaagacctaccctccgtttttctactagataggaggatggtagaagtttggctgctgtcataacatccagagctttgtcgtatttggcacacagcagaggcccagatattagaaaggctctattccaataaactatgaggactgccttatggatgatttaagtgtctcactaaagcatgaaatgtgaatttttattgttgtacatacgatttaaggtatttaaagtattttcttctctgtgagaaggtttattgttaatacaaggtataataaaattatcgcaacccctctccttccagtataaccagctgaagttgcagatgttagatatttttcataaacaagttcgagtcaaagttgaaaattcatagtaagattgatatctataaaatagatataaatttttaagagaaagaatttagtattatcaaagggataaagaaaaaaatactatttaagatgtgaaaattacagtccaaaatactgttctttccaggctatgtataaaatacatagtgaaaattgtttagtgatattacatttatttatccagaaaactgtgatttcaggagaacctaacatgctggtgaatattttcaactttttccctcactaattggtacttttaaaaacataacataaattttttgaagtctttaataaataacccataattgaagtgtataatataaaaaattttaaaaatctaagcagcttattgtttctctgaaagtgtgtgtagttttactttcctaaggaattaccaagaatatcctttaaaatttaaaaggatggcaagttgcatcagaaagctttattttgagatgtaaaaagattcccaaacgtggttacattagccattcatgtatgtcagaagtgcagaattggggcacttaatggtcaccttgtaacagttttgtgtaactcccagtgatgctgtacacatatttgaagggtctttctcaaagaaatattaagcatgttttgttgctcagtgtttttgtgaattgcttggttgtaattaaattctgagcctgatattgatatggttttaagaagcagttgtaccaagtgaaattattttggagattataataaatatatacattcaa

SEQ ID NO: 850 - DNA, 6169 bp, Homo sapiens
gagattcctcaggcttcccttgtgaggctgcctgggttctgccgctgggtggtttgggatgtccaagagatatcccctttcagccagtgactcggtcctcagttgctgctccggaaagacgctggggctgggaagggccctgtgtcctctggctttaaaatgggcaatgctattgaaaaacagaagcccttgaaacgaagtcatctgtacccctggaaacaagactctcagcgttctcatctctcttccttcaccatgaagctgatggacaaattccactcacccaaaatcaagagaacgccatcaaagaagggaaaaccagctgaggtgtccgtaaagattccagagaagcctgtgaacaaagaggcaacagacagatttctaccagagggctaccctctccccttggatctggagcagcaggcagtagaatttatgtccaccagtgctgtggcttccaggtctcaaaggcagaagaacctgagctggctggaggagaaagagaaggaagttgtcagtgccctgcgctactttaagaccattgtggacaaaatggcaattgataagaaggtactggagatgcttccagggtcagccagcaaggtgctggaggccatcttacccctggtgcagaacgatcctcgaattcagcacagctcagccctctcttcctgctatagccgagtgtaccaaagcctcgccaacctcattcgctggtctgaccaagtgatgctggaaggcgtgaactcagaagacaaggagatggtgacgactgtgaagggggtcatcaaggctgtgctggatggagtgaaggagctggtcaggctcaccatcgagaagcagggacgtccgtctccgacgagccccgtgaagcccagttcccctgccagcaagcctgatggcccagcagagctccccctgacagaccgcgaggtagagatcctaaacaagacgactgggatgtcacagtcaactgagctcctcccagatgccacggatgaagaggtcgcgccccccaagcctcctctgcctggcattcgggtggttgataatagtcctccaccagcattgccacccaagaaaagacagtcggcgccgtcccctacccgagtggctgtggtggcccccatgagccgagccaccagtggctccagtttgcctgttggaatcaataggcaggattttgatgttgactgttacgcacagaggcgactgtcaggaggcagccactcatatggtggagagtcgccccgcctctccccctgcagcagcataggcaagctcagcaagtcagacgagcagctgtcctctctggacagggacagtgggcagtgctcccggaacacaagctgtgaaacactagaccactatgatcccgactatgaattcctccagcaagacctctctaacgcagaccagatacctcagcagacggcctggaaccttagcccgttgccagagtctttgggggagtctgggtctccatttcttggccctcctttccagctgcctcttggcggccatccccagccagacggacctctggccccagggcagcagacagatacgccacctgctctccccgagaagaagcgcaggagcgcagcctcccagacggcggacggctctggctgcagggtgtcctacgagcggcatccctcgcagtatgacaacatctctggggaggacctgcagagcacagccccgatcccatccgtcccctacgcgccctttgctgctattctgccctttcagcatggaggttcctcagcccctgtcgaatttgtgggtgattttactgctcctgagtcaaccggtgacccagaaaaaccacctcctctaccagagaagaaaaacaaacacatgctggcctacatgcagttgctggaggactactcggagccgcagccctctatgttctaccagacgccacagaacgagcacatctaccagcagaagaacaagctcctcatggaggtatacggcttcagcgactccttcagtggggtggactccgtgcaggagctggccccgccgcccgccctaccccccaagcagcggcagctggagccaccggctgggaaagacggacatcccagagatccctcagcggtcagcggcgtccctgggaaggacagcagagacggcagtgagagggccccaaagtcaccagatgctctggagtcggctcagtcggaggaggaagtggacgagctgtccctcattgaccacaacgaaattatgtccaggctgacgctcaagcaggagggtgatgacgggccggacgtccgcggaggatctggggacatcttactggtccatgctactgagactgacaggaaagatttggtgttgtactgcgaggcattcctgaccacctacaggaccttcatctccccagaggagctcatcaagaagctgcagtacagatatgagaaattctctccctttgccgacacattcaagaagcgcgtcagcaagaacacgttcttcgtgctggtacgggtggtggatgagctctgcctggtggagttgacagaagagatcctgaagctgctgatggaactggtcttccgcctggtgtgcaatggggagctgagcctggcccgtgtgctccggaagaacatcctggacaaggtggaccagaagaagctactcaggtgtgccacctccagccagcccctggcagcccggggggtagcagccaggccggggaccttgcacgactttcacagccatgagatagcggagcagctaacgctgctggatgctgagctcttctataaaatagagattcctgaggttttgctttgggcaaaagagcagaatgaggagaagagccccaacttgacccagttcacggagcacttcaacaacatgtcctactgggtccggtccataatcatgttacaggaaaaggcccaggacagggaacggctgctcttgaagttcatcaagatcatgaagcacttgcggaagctgaataacttcaactcctacttggccatcctctctgccctggactcggcgcccatccgcaggctggagtggcagaagcagacttcagagggcctggccgagtactgcacactgatcgacagctcgtcctccttccgagcctaccgggccgccctctcggaggtggaaccgccgtgcatcccgtacctggggctgatcctgcaggacctgaccttcgttcacctgggaaacccagactacatcgacgggaaagtgaacttctccaagcggtggcagcagttcaacatcctcgacagcatgcgctgcttccagcaggcgcactatgacatgcggaggaacgacgacattataaacttcttcaatgacttcagtgaccacctggctgaggaggccctatgggaactgtctctgaaaattaaacccaggaacataacaaggagaaaaacagaccgggaagagaagacctaggagcagacgccgggatccaggagaatgctcgaggggcgcagagggcagctcccagaccggagaggaccttggacctgttaggcgcatggcaggagtcccggcctcggagccatgaggctggccagccctcagcggggccgggcgggagctggagcctgccagccgcttcctgcctccttcctctgtgggagcagacccgtgggcctcagggcagccagcaggcaggtcttgttgccaatttacaaaccggtggttttctggtttggttttgttttctgcttttacttccatctctcccctcttgaccttccacccactcccctccagggagagagcagcagagacctcatcagcagaccaaggaagtggtgggtgctccccctccctaagctccagggtccctgaatcttctgaaatctcaaatgagtggaggcctcctggggtggcctgtcctgcaggggccctggaatgggggcaagcagctgggtgggcagaatgcagagtagactcgggggaggatcctttcactttccgcttccccttctgatgcatggaggatggtgtgagcttttcagcaggcccggaaaggtacgcaggtgacgccttagcagccccgcagctggtgctctgccccgcggtactggcgccatcagggcctcccttgcccgcctgagagcagcagcagtctctgtcatcccgtcgccccttaccccccaccccaggccactgggcccctcccacaccacctggggagctgagaagaggaggctggagtaagggaggacttgatcatccaagaaatactttttattgctgggagtcttctgaacctcaccaaactgaggccagagctgagctcctgggggagttaattcagaggggagaggccagcacctccctcctccatcgctcgctgtgtgccttaaactccatctcatgtccctccccatcccctggctttccctccctccttgccccatcctgggccagccagcagggctcctcctctggctcttcagacctttcagccagtgctgtcagtgcccctgggagggaagggcatccctgaggcacccgaatggtccctcagggtgcagggaggcagaagcctggccacagaggagcctcctaaggcagcagctgcagcaagcgcaccctctccccactctccccacgccagagcggcttccagagcagatgctgtttccatcctcctcgtcaaaaccattctcgctgctgagcttgacaatctgggcaaggcttgtggggcgcttgacaaacagaatctgccctgtgccgcctggttccgtggcctccagcatgagcctgcaggcagggcgctgcgggaacccagttgtgctgccccagcccatgcctccgggtctgctgtgcatgaatgagtgctcacttgtcccgggtttaggacgtggtcaagtgaacagcagggtctaactgtgcttacttagcccagttcaaacagaacaaaggaaaaatatagaaagcaacatctgttgatcatttaggtttttttttaaaccaccatgtcactttgagtccttcatgggtttttgaacagcatttatcaagaagaaaatgtgggctttttcccctctcccgtgttttgtttgtcctgtagatagagggaggaaagccgtgcagtggcaggcgggaccccctctggtggcgggaccccctcttgcggtggtcttgcggggccagccgggacctgtcactttattatttaaggagtgtgtgtgtagagtcgctggcttattaacagtattgtgtgtgggttgggtttttagtttgttccttctttttgaagtcccttcatttcaatccttgactctctctccccttcccttgcccagctctgttgaatgctgctgtgcgcgtgtgagggccgctctgcacacagggcccttgggttgtgtgaactgaaattctccctgtatttgtgagactcgcaggagtccccatctgtagcacaggcaatgccagtgccatgctgcagcctcagaaaccaggcctctcactccagcagcaggcagaaccgtgtctgtggtcgggtgctgtccacagctctgtctgccttgttcttgggcttgagctggatagaggtggggtctcttcaccttccctgaattcagaacagaccctgtgcctggccccagtgtgcccaggcaattccccaggccctcactgggagcccttggtgttctgagcagcagggcccaggcagcacatgagcagtgcccaggggctccctgcgtgaggacggcaaggtgcgatgtatgtctaacttattgatggcaggcagccccctgtgccccctaagcctggccctggttattgctgagctctgtgctcagtgctgcggcctggccgtggctcgtctgttcctttggggggcccgggcgggttgtgggaatcagtcttcacagacagacgtgagccaggcggaggactcgttccttgcagaggtcagtcctcacctgcaggtgtcggggtgtgggggggcaaggaggggcaggcacacaccatgtctgacctgaacccgattctggggagcatcttcccgctccggccccacgacctccacagggttacattgtaatatatatgccccagctaacctgtctgatggtggcatcttcctgcagacatttcaaacatgtaacttttatatgaaaaaaaataaacacagatgaaagctgcccaa

SEQ ID NO: 851 - DNA, 2258 bp, Homo sapiens
gcagccccgggcgccgcgcgtcctgcccggcctgcggccccagcccttgcgccgctcgtccgacccgcgatcgtccaccagaccgtgcctcccggccgcccggccggcccgcgtgcatgcttcggtctgggccagcctctgggccgtccgtccccactggccgggccatgccgagtcgccgcgtcgccagaccgccggctgcgccggagctgggggccttagggtcccccgacctctcctcactctcgctcgccgtttccaggagcacagatgaattggagatcatcgacgagtacatcaaggagaacggcttcggcctggacgggggacagccgggcccgggcgaggggctgccacgcctggtgtctcgcggggctgcgtccctgagcacggtcaccctgggccctgtggcgcccccagccacgccgccgccttggggctgccccctgggccgactagtgtccccagcgccgggcccgggcccgcagccgcacctggtcatcacggagcagcccaagcagcgcggcatgcgcttccgctacgagtgcgagggccgctcggccggcagcatccttggggagagcagcaccgaggccagcaagacgctgcccgccatcgagctccgggattgtggagggctgcgggaggtggaggtgactgcctgcctggtgtggaaggactggcctcaccgagtccacccccacagcctcgtggggaaagactgcaccgacggcatctgcagggtgcggctccggcctcacgtcagcccccggcacagttttaacaacctgggcatccagtgtgtgaggaagaaggagattgaggctgccattgagcggaagattcaactgggcattgacccctacaacgctgggtccctgaagaaccatcaggaagtagacatgaatgtggtgaggatctgcttccaggcctcatatcgggaccagcagggacagatgcgccggatggatcctgtgctttccgagcccgtctatgacaagaaatccacaaacacatcagagctgcggatttgccgaattaacaaggaaagcgggccgtgcaccggtggcgaggagctctacttgctctgcgacaaggtgcagaaagaggacatatcagtggtgttcagcagggcctcctgggaaggtcgggctgacttctcccaggccgacgtgcaccgccagattgccattgtgttcaagacgccgccctacgaggacctggagattgtcgagcccgtgacagtcaacgtcttcctgcagcggctcaccgatggggtctgcagcgagccattgcctttcacgtacctgcctcgcgaccatgacagctacggcgtggacaagaagcggaaacgggggatgcccgacgtccttggggagctgaacagctctgacccccatggcatcgagagcaaacggcggaagaaaaagccggccatcctggaccacttcctgcccaaccacggctcaggcccgttcctcccgccgtcagccctgctgccagaccctgacttcttctctggcaccgtgtccctgcccggcctggagccccctggcgggcctgacctcctggacgatggctttgcctacgaccctacggcccccacactcttcaccatgctggacctgctgcccccggcaccgccacacgctagcgctgttgtgtgcagcggaggtgccggggccgtggttggggagacccccggccctgaaccactgacactggactcgtaccaggccccgggccccggggatggaggcaccgccagccttgtgggcagcaacatgttccccaatcattaccgcgaggcggcctttgggggcggcctcctatccccggggcctgaagccacgtagccccgcgatgccagaggaggggcactgggtggggagggaggtggaggagccgtgcaatcccaaccaggatgtctagcacccccatccccttggcccttcctcatgcttctgaagtggacatattcagccttggcgagaagctccgttgcacgggtttccccttgagcccattttacagatgaggaaactgagtccggagaggaaaagggacatggctcccgtgcactagcttgttacagctgcctctgtccccacatgtgggggcaccttctccagtaggattcggaaaagattgtacatatgggaggagggggcagattcctggccctccctccccagacttgaaggtggggggtaggttggttgttcagagtcttcccaataaagatgagtttttgagcc

SEQ ID NO: 852 - DNA, 498 bp, Homo sapiens
cctttctcgttccccggccatcttagcggctgctgttggttgggggccgtcccgctcctaaggcaggaagatggtggccgcaaagaagacgaaaaagtcgctggagtcgatcaactctaggctccaactcgttatgaaaagtgggaagtacgtcctggggtacaagcagactctgaagatgatcagacaaggcaaagcgaaattggtcattctcgctaacaactgcccagctttgaggaaatctgaaatagagtactatgctatgttggctaaaactggtgtccatcactacagtggcaataatattgaactgggcacagcatgcggaaaatactacagagtgtgcacactggctatcattgatccaggtgactctgacatcattagaagcatgccagaacagactggtgaaaagtaaaccttttcacctacaaaatttcacctgcaaaccttaaacctgcaaaattttcctttaataaaatttgcttgttttaaaaa

SEQ ID NO: 853 - DNA, 485 bp, Homo sapiens
cttccttggctcagtgcccttcaccactgctggctttttgctgtagctccacattcctgtgcattgaggggttaacattaggctgggaagatgacaaaacttgaagagcatctggagggaattgtcaatatcttccaccaatactcagttcggaaggggcattttgacaccctctctaagggtgagctgaagcagctgcttacaaaggagcttgcaaacaccatcaagaatatcaaagataaagctgtcattgatgaaatattccaaggcctggatgctaatcaagatgaacaggtcgactttcaagaattcatatccctggtagccattgcgctgaaggctgcccattaccacacccacaaagagtaggtagctctctgaaggctttttacccagcaatgtcctcaatgagggtcttttctttccctcaccaaaacccagccttgcccgtggggagtaagagttaataaacacactcacgaaaa

SEQ ID NO: 854 - DNA, 2613 bp, Homo sapiens
actcgccgcagcctgcgcgccttctccagtccgcggtgccatggcccccgcccgtctgttcgcgctgctgctgttcttcgtaggcggagtcgccgagtcgatccgagagactgaggtcatcgacccccaggacctcctagaaggccgatacttctccggagccctaccagacgatgaggatgtagtggggcccgggcaggaatctgatgactttgagctgtctggctctggagatctggatgacttggaagactccatgatcggccctgaagttgtccatcccttggtgcctctagataaccatatccctgagagggcagggtctgggagccaagtccccaccgaacccaagaaactagaggagaatgaggttatccccaagagaatctcacccgttgaagagagtgaggatgtgtccaacaaggtgtcaatgtccagcactgtgcagggcagcaacatctttgagagaacggaggtcctggcagctctgattgtgggtggcatcgtgggcatcctctttgccgtcttcctgatcctactgctcatgtaccgtatgaagaagaaggatgaaggcagctatgacctgggcaagaaacccatctacaagaaagcccccaccaatgagttctacgcgtgaagcttgcttgtgggcactggcttggactttagcggggagggaagccaggggattttgaagggtggacattagggtagggtgaggtcaacctaatactgacttgtcagtatctccagctctgattacctttgaagtgttcagaagagacattgtcttctactgttctgccaggttcttcttgagctttgggcctcagttgccctggcagaaaaatggattcaacttggcctttctgaaggcaagactgggattggatcacttcttaaacttccagttaagaatctaggtccgccctcaagcccatactgaccatgcctcatccagagctcctctgaagccagggggctaacggatgttgtgtggagtcctggctggaggtcctcccccagtggccttcctcccttcctttcacagccggtctctctgccaggaaatgggggaaggaactagaaccacctgcaccttgagatgtttctgtaaatgggtacttgtgatcacactacgggaatctctgtggtatatacctggggccattctaggctctttcaagtgacttttggaaatcaaccttttttatttgggggggaggatggggaaaagagctgagagtttatgctgaaatggatttatagaatatttgtaaatctatttttagtgtttgttcgtttttttaactgttcattcctttgtgcagagtgtatatctctgcctgggcaagagtgtggaggtgccgaggtgtcttcattctctcgcacatttccacagcacctgctaagtttgtatttaatggtttttgtttttgtttttgtttgtttcttgaaaatgagagaagagccggagagatgatttttattaattttttttttttttttttttttttactatttatagctttagatagggcctcccttcccctcttctttctttgttctctttcattaaaccccttccccagttttttttttatactttaaaccccgctcctcatggccttggccctttctgaagctgcttcctcttataaaatagcttttgccgaaacatagtttttttttagcagatcccaaaatataatgaaggggatggtgggatatttgtgtctgtgttcttataatatattattattcttccttggttctagaaaaatagataaatatatttttttcaggaaatagtgtggtgtttccagtttgatgttgctgggtggttgagtgagtgaattttcatgtggctgggtgggtttttgcctttttctcttgccctgttcctggtgccttctgatggggctggaatagttgaggtggatggttctaccctttctgccttctgtttgggacccagctggtgttctttggtttgctttcttcaggctctagggctgtgctatccaatacagtaaccacatgcggctgtttaaagttaagccaattaaaatcacataagattaaaaattccttcctcagttgcactaaccacgtttctagaggcgtcactgtatgtagttcatggctactgtactgacagcgagagcatgtccatctgttggacagcactattctagagaactaaactggcttaacgagtcacagcctcagctgtgctgggacgacccttgtctccctgggtaggggggggggaatgggggagggctgatgaggccccagctggggcctgttgtctgggaccctccctctcctgagaggggaggcctggtggcttagcctgggcaggtcgtgtctcctcctgaccccagtggctgcggtgaggggaaccaccctcccttgctgcaccagtggccattagctcccgtcaccactgcaacccagggtcccagctggctgggtcctcttctgcccccagtgcccttccccttgggctgtgttggagtgagcacctcctctgtaggcacctctcacactgttgtctgttactgattttttttgataaaaagataataaaacctggtactttctaaa

SEQ ID NO: 855 - DNA, 2290 bp, Homo sapiens; identical to SEQ ID NO: 339

SEQ ID NO: 856 - DNA, 6960 bp, Homo sapiens
gatacgggatccttctctcttgagccggcagagccctggggagccagctgcaccaggagctcttggccgtccttcctgttctcctctccgcaggtccagcaccgccgcagccacttccttctgtggagcagcaggtgctggggctaaagtgcccagaggtgtccctggaggcccctgtgagcccagccagcgcagtgcgcaccaccctcttaggcaacaggagcagcacaagaacctgctatgggcttcttgcccaagcttctcctcctggcctcattcttcccagcaggccaggcctcatggggcgtctccagtccccaggacgtgcagggtgtgaaggggtcttgcctgcttatcccctgcatcttcagcttccctgccgacgtggaggtgcccgacggcatcacggccatctggtactacgactactcgggccagcggcaggtggtgagccactcggcggaccccaagctggtggaggcccgcttccgcggccgcaccgagttcatggggaaccccgagcacagggtgtgcaacctgctgctgaaggacctgcagcccgaggactctggttcctacaacttccgcttcgagatcagtgaggtcaaccgctggtcagatgtgaaaggcaccttggtcacagtaacagaggagcccagggtgcccaccattgcctccccggtggagcttctcgagggcacagaggtggacttcaactgctccactccctacgtatgcctgcaggagcaggtcagactgcagtggcaaggccaggaccctgctcgctctgtcaccttcaacagccagaagtttgagcccaccggcgtcggccacctggagaccctccacatggccatgtcctggcaggaccacggccggatcctgcgctgccagctctccgtggccaatcacagggctcagagcgagattcacctccaagtgaagtatgcccccaagggtgtgaagatcctcctcagcccctcggggaggaacatccttccaggtgagctggtcacactcacctgccaggtgaacagcagctaccctgcagtcagttccattaagtggctcaaggatggggtacgcctccaaaccaagactggtgtgctgcacctgccccaggcagcctggagcgatgctggcgtctacacctgccaagctgagaacggcgtgggctctttggtctcaccccccatcagcctccacatcttcatggctgaggtccaggtgagcccagcaggtcccatcctggagaaccagacagtgacactagtctgcaacacacccaatgaggcacccagtgatctccgctacagctggtacaagaaccatgtcctgctggaggatgcccactcccataccctccggctgcacttggccactagggctgatactggcttctacttctgtgaggtgcagaacgtccatggcagcgagcgctcgggccctgtcagcgtggtagtcaaccacccgcctctcactccagtcctgacagccttcctggagacccaggcgggacttgtgggcatccttcactgctctgtggtcagtgagcccctggccacactggtgctgtcacatgggggtcatatcctggcctccacctccggggacagtgatcacagcccacgcttcagtggtacctctggtcccaactccctgcgcctggagatccgagacctggaggaaactgacagtggggagtacaagtgctcagccaccaactcccttggaaatgcaacctccaccctggacttccatgccaatgccgcccgtctcctcatcagcccggcagccgaggtggtggaaggacaggcagtgacactgagctgcagaagcggcctaagccccacacctgatgcccgcttctcctggtacctgaatggagccctgcttcacgagggtcccggcagcagcctcctgctccccgcggcctccagcactgacgccggctcataccactgccgggcccgggacggccacagtgccagtggcccctcttcgccagctgttctcactgtgctctacccccctcgacaaccaacattcaccaccaggctggaccttgatgccgctggggccggggctggacggcgaggcctccttttgtgccgtgtggacagcgacccccccgccaggctgcagctgctccacaaggaccgtgttgtggccacttccctgccatcagggggtggctgcagcacctgtgggggctgttccccacgcatgaaggtcaccaaagcccccaacttgctgcgtgtggagattcacaaccctttgctggaagaggagggcttgtacctctgtgaggccagcaatgccctgggcaacgcctccacctcagccaccttcaatggccaggccactgtcctggccattgcaccatcacacacacttcaggagggcacagaagccaacttgacttgcaacgtgagccgggaagctgctggcagccctgctaacttctcctggttccgaaatggggtgctgtgggcccagggtcccctggagaccgtgacactgctgcccgtggccagaactgatgctgccctttacgcctgccgcatcctgactgaggctggtgcccagctctccactcccgtgctcctgagtgtactctatcccccggaccgtccaaagctgtcagccctcctagacatgggccagggccacatggctctgttcatctgcactgtggacagccgccccctggccttgctggccttgttccatggggagcacctcctggccaccagcctgggtccccaggtcccatcccatggtcggttccaggctaaagctgaggccaactccctgaagttagaggtccgagaactgggccttggggactctggcagctaccgctgtgaggccacaaatgttcttggatcatccaacacctcactcttcttccaggtccgaggagcctgggtccaggtgtcaccatcacctgagctccaagagggccaggctgtggtcctgagctgccaggtacacacaggagtcccagaggggacctcatatcgttggtatcgggatggccagcccctccaggagtcgacctcggccacgctccgctttgcagccataactttgacacaagctggggcctatcattgccaagcccaggccccaggctcagccaccacgagcctagctgcacccatcagcctccacgtgtcctatgccccacgccacgtcacactcactaccctgatggacacaggccctggacgactgggcctcctcctgtgccgtgtggacagtgaccctccggcccagctgcggctgctccacggggatcgccttgtggcctccaccctacaaggtgtggggggacccgaaggcagctctcccaggctgcatgtggctgtggcccccaacacactgcgtctggagatccacggggctatgctggaggatgagggtgtctatatctgtgaggcctccaacaccctgggccaggcctcggcctcagctgacttcgacgctcaagctgtgaatgtgcaggtgtggcccggggctaccgtgcgggaggggcagctggtgaacctgacctgccttgtgtggaccactcacccggcccagctcacctacacatggtaccaggatgggcagcagcgcctggatgcccactccatccccctgcccaacgtcacagtcagggatgccacctcctaccgctgcggtgtgggcccccctggtcgggcaccccgcctctccagacctatcaccttggacgtcctctacgcgccccgcaacctgcgcctgacctacctcctggagagccatggcgggcagctggccctggtactgtgcactgtggacagccgcccgcccgcccagctggccctcagccacgccggtcgcctcttggcctcctcgacagcagcctctgtccccaacaccctgcgcctggagctgcgagggccacagcccagggatgagggtttctacagctgctctgcccgcagccctctgggccaggccaacacgtccctggagctgcggctggagggtgtgcgggtgatcctggctccggaggctgccgtgcctgaaggtgcccccatcacagtgacctgtgcggaccctgctgcccacgcacccacactctatacttggtaccacaacggtcgttggctgcaggagggtccagctgcctcactctcattcctggtggccacgcgggctcatgcaggcgcctactcttgccaggcccaggatgcccagggcacccgcagctcccgtcctgctgccctgcaagtcctctatgcccctcaggacgctgtcctgtcctccttccgggactccagggccagatccatggctgtgatacagtgcactgtggacagtgagccacctgctgagctggccctatctcatgatggcaaggtgctggccacgagcagcggggtccacagcttggcatcagggacaggccatgtccaggtggcccgaaacgccctacggctgcaggtgcaagatgtgcctgcaggtgatgacacctatgtttgcacagcccaaaacttgctgggctcaatcagcaccatcgggcggttgcaggtagaaggtgcacgcgtggtggcagagcctggcctggacgtgcctgagggcgctgccctgaacctcagctgccgcctcctgggtggccctgggcctgtgggcaactccacctttgcatggttctggaatgaccggcggctgcacgcggagcctgtgcccactctcgccttcacccacgtggctcgtgctcaagctgggatgtaccactgcctggctgagctccccactggggctgctgcctctgctccagtcatgctccgtgtgctctaccctcccaagacgcccaccatgatggtcttcgtggagcctgagggtggcctccggggcatcctggattgccgagtggacagcgagccgctcgccagcctgactctccaccttggcagtcgactggtggcctccagtcagccccagggtgctcctgcagagccacacatccatgtcctggcttcccccaatgccctgagggtggacatcgaggcgctgaggcccagcgaccaaggggaatacatctgttctgcctcaaatgtcctgggctctgcctctacctccacctactttggggtcagagccctgcaccgcctgcatcagttccagcagctgctctgggtcctgggactgctggtgggcctcctgctcctgctgttgggcctgggggcctgctacacctggagaaggaggcgtgtttgtaagcagagcatgggcgagaattcggtggagatggcttttcagaaagagaccacgcagctcattgatcctgatgcagccacatgtgagacctcaacctgtgccccacccctgggctgaccagtggtgttgcctgccctccggaggagaaagtggccagaatctgtgatgactccagcctatgaatgtgaatgaggcagtgttgagtcctgcccgcctctacgaaaacagctctgtgacatctgactttttatgacctggccccaagcctcttgcccccccaaaaatgggtggtgagaggtctgcccaggagggtgttgaccctggaggacactgaagagcactgagctgatctcgctctctcttctctggatctcctcccttctctccatttctccctcaaaggaagccctgccctttcacatccttctcctcgaaagtcaccctggactttggttggattgcagcatcctgcatcctcagaggctcaccaaggcattctgtattcaacagagtatcagtcagcctgctctaacaagagaccaaatacagtgacttcaacatgatagaattttatttttctctcccacgctagtctggctgttacgatggtttatgatgttggggctcaggatccttctatcttccttttctctatccctaaaatgatgcctttgattgtgaggctcaccatggccccgctttgtccacatgccctccagccagaagaaggaagagtggaggtagaagcacacccatgcccatggtggacgcaactcagaagctgcacaggacttttccactcacttcccattggctggagtattgtcacatggctactgcaagctacaagggagactgggaaatgtagtttttattttgagtccagaggacatttggaattggacttccaaaggactcccaactgtgagctcatccctgagacttttgacattgttgggaatgccaccagcaggccatgttttgtctcagtgcccatctactgagggccagggtgtgcccctggccattctggttgtgggcttcctggaagaggtgatcactctcacactaagactgaggaaataaaaaaggtttggtgttttcctagggagagagcatgccaggcagtggagttgcctaagcagacatccttgtgccagatttggcccctgaaagaagagatgccctcattcccaccaccaccccccctacccccagggactgggtactaccttactggcccttacaagagtggagggcagacacagatgttgtcagcatccttattcctgctccagatgcatctctgttcatgactgtgtgagctcctgtccttttcctggagaccctgtgtcgggctgttaaagagaatgagttaccaagaaggaatgacgtgcccctgcgaatcagggaccaacaggagagagctcttgagtgggctagtgactccccctgcagcctggtggagatggtgtgaggagcgaagagccctctgctctaggatttgggttgaaaaacagagagagaagtggggagttgccacaggagctaacacgctgggaggcagttgggggcgggtgaactttgtgtagccgaggccgcaccctccctcattccaggctcattcattttcatgctccattgccagactcttgctgggagcccgtccagaatgtcctcccaataaaactccatcctatgacgcaa

SEQ ID NO: 857 - DNA, 1238 bp, Homo sapiens
gaacagagcgagctgcggccgtggcagctgcacggctcctggccccggagcatgcgcgagagccgccccggagcgccccggagccccccgccgtcccgcccgcggcgtcccgcgccccgccgccagcgcacccccggacgctatggcccacccctccggctggccccttctgtaggatggtagcacacaaccaggtggcagccgacaatgcagtctccacagcagcagagccccgacggcggccagaaccttcctcctcttcctcctcctcgcccgcggcccccgcgcgcccgcggccgtgccccgcggtcccggccccggcccccggcgacacgcacttccgcacattccgttcgcacgccgattaccggcgcatcacgcgcgccagcgcgctcctggacgcctgcggattctactgggggcccctgagcgtgcacggggcgcacgagcggctgcgcgccgagcccgtgggcaccttcctggtgcgcgacagccgccagcggaactgctttttcgcccttagcgtgaagatggcctcgggacccacgagcatccgcgtgcactttcaggccggccgctttcacctggatggcagccgcgagagcttcgactgcctcttcgagctgctggagcactacgtggcggcgccgcgccgcatgctgggggccccgctgcgccagcgccgcgtgcggccgctgcaggagctgtgccgccagcgcatcgtggccaccgtgggccgcgagaacctggctcgcatccccctcaaccccgtcctccgcgactacctgagctccttccccttccagatttgaccggcagcgcccgccgtgcacgcagcattaactgggatgccgtgttattttgttattacttgcctggaaccatgtgggtaccctccccggcctgggttggagggagcggatgggtgtaggggcgaggcgcctcccgccctcggctggagacgaggccgcagaccccttctcacctcttgagggggtcctccccctcctggtgctccctctgggtccccctggttgttgtagcagcttaactgtatctggagccaggacctgaactcgcacctcctacctcttcatgtttacatatacccagtatctttgcacaaaccaggggttgggggagggtctctggctttatttttctgctgtgcagaatcctattttatattttttaaagtcagtttaggtaataaactttattatgaaagtttttttttt

SEQ ID NO: 858 - DNA, 5504 bp, Homo sapiens
agatgcggccgcggcggcgcggagctcgggcggccgtggaggaactcagcctcggccgcaggaggcgccgggagcggagccgccgggagtcgcgcaacaggtttccttctccatcgctgcgcccacaggggacgcgcgccctgccgggagaggggcttctcggttcgcactctcgctcccagtccaggcaaaatgaaagaccggctagcagaacttctggacttgtccaagcaatatgaccagcagttcccagacggggacgatgagtttgactcgccccacgaggacatcgtgttcgagacggaccacatcctggagtccctgtaccgagacatccgggacattcaggatgaaaaccagctgctggtggccgacgtgaagcggctgggaaagcagaacgcccgcttcctcacgtccatgcggcgcctcagcagcatcaagcgcgacaccaactccatcgccaaggccatcaaggcccggggcgaggtcatccactgcaagctgcgcgccatgaaggagctgagcgaggcggctgaggcccagcacggcccgcactcggcagtggcgcgcatttcgcgggcgcagtacaacgcgctcaccctcaccttccagcgcgccatgcacgactacaaccaggccgagatgaagcagcgcgacaactgcaagatccgcatccagcgccagctggagatcatgggcaaggaagtctcgggcgaccagatcgaggacatgttcgagcagggtaagtgggacgtgttttccgagaacttgctggccgacgtgaagggcgcgcgggccgccctcaacgagatcgagagccgccaccgcgaactgctgcgcctggagagccgcatccgcgacgtacacgagctcttcttgcagatggcggtgctggtggagaagcaggccgacaccctgaacgtcatcgagctcaacgtacaaaagacggtcgactacaccggccaggccaaggcgcaggtgcggaaggccgtgcagtacgaggagaagaacccctgccggaccctctgctgcttctgctgtccctgcctcaagtagcaggccggcccgggccgccaccgcccatcccagaccatggagcgcgctgggaaggacgcaccaaagccgggagctctgccctgcagggagttgccccaaccctttccggaactcagtctttagaaaagaaacgccaggttcaagaattgcaaaccagcctgtgcttggaaagatggttagttgataccgtccgatgattcttcagtaaagatagattcccacaaagttgtgcaatgtcattatatgacaccttgcactcttaccgtcttgacagaagccaagtaaggaactgaagttgtatctgactgtagggtgaatgtctgaggcctgcctcctaataaagactcaaggaggaagtcaattgggcatctgctaatagaatgaactcatgatggaaacttcagttcatttactttgtcctgaaaattccctggttctgttccattttgagcgaaattggccttgggaaaaaccacgttcttcctttccgattcttcatccggtctacgctatgcaattcctccccaaatatagatcttatttctgctcatttcccctacttattaaaatcacaccaaacacttactattttcttatctctttcactttttaaatatctttcaccaggttatattttggtattatttttccaaacatttttaagcactgaatatcgaacaagcactcaaattgaagtatcagtcatgttttgtgtatttttcgctgataaaaattatttaacatttatatttttacttgattacatatgcacatgtatgtaaatgtaaaatactaatattcactaatatatgtacataatgatcaattggtttaacttcttttatgtaagtatggtatataaatttcaagacgaacacttttctggctcttggtattggtttgcttgttttgagtttgtttcactccagtttgccccttcctagtccagtttgggtcaaacttcatgttaaacaactctgcattggttatggcggtagacatatggcggtagaaaatgtatacggagctagagacaactaacattcttggaaatactgcttttgttttactgtggaccattccttccatgcattgaaatggagaaattcaaagtaaaagaattctgtttttcaagcaagcttaataaacattacattatacacatatttttatacatttctggcttgaccatttagtttactttctcaattattgttaaaatttttctttttcctttttttttttttttttttgagatggagtctcactgtgttgcccaggctggagtgcagtggcaggatcttggctcattgcaacctctgtctcccaggttcgagcgattctcctgactcagcctcctgagaagttgggactctgggcgcgtgccacaatgtctggctaattttttatgtttttagtaaagacggtgtttcaccgtgttagccaggatggtcttgatctcctgacctcgtgatccgcccgcctcagcctcccatagtgctgggattacaggtgtgagccaccatgcctggccttttttccccccttttgagacagggtctccctttgtcacccaggctgaagtgcagtggcataatcatggcttactgcagccttaaactcccaggctcaagtgatcctcccacctcagcctacaaatagctgagactacagatatgtgccaccatgcccggctaatttttgtattttctgtagagacagggtttgccatgtggcccaggctggtctcaaacttgtgagcttgagcaatccgcccaccttggcctcccaaagtgctgagattacaggcctgagccactgaccctggccaaattttttttctactagctactgaggctgccacatctggatggaactgagtggagggggaaaagaatgaaaaactcaaaagaattcccatgagggtgtcttgctttctctcctgagttacaatactttagcaaaatcatgaggctttagagatatggtgtagtctgcaaacttcttaatgcccttacccacatttaccatgtttcctggccttcctctgtgtcaactcttagctcttcctaatcattatttaatacatgagtgagtttagtagtgatcatatttctcaggtcctttagaagctggaattttaaaagaattagaaggaggagtatgtgaattctttggagctcactgcctgacttgcttatgaccaggaaaatctatcccctgtatctaattttaatttcatggttaaatttgagaattgtggaaaccaagttccacaaggctattctcatatttctcccaatttctttttcagccaactccaaggatatgtatcacctttgacttaatttgctttctctaagggaaaggggaaaaaatgttcacatagctccactgcaatgttttttataatagaggagagatattgtaaatagagactgccagccagtttccacaaaaaaacgaagagttcataaatttgacatgtttgaacccataaagcattttctttgcttggaaccattataaaagtaagtgagttttcaggctctatatacattttaattcctcacgttttatattggagagttcggtacagactgtccattactgcaccaaaagaatgagtgaactgttacctatagggaaagaacacttcttcttcctgctgtttgggaaccatctcagtgtggcgtaatggttaggagtacagattccagatcctgtttcttagatttaaatcttgactctgccacatactagctgtctgactgaaccttggtttttctgtgcttcagtttcctcatctgtaaaacggagataacagtacttacctcatagagctgttgtgaaaagtgatgactgaatatgtaaaagcacctagaacagtgcctggcacatgctaagtgctttgttcattattgttgttattatgtaattttctctcagactgagagcactgttagtgacccaagtaaatttatagtttttaagtacagaggaaaaataaagcctattttttgttaacagtcttaataaataataaaatggaataaagaaaccaagaccccatcttctgtgaatattagggcttttttttttttgacagtcataaagatgttttcactatggcatttctatccctgtgtatatccaaacatgtcctgaagaagaaatgagatgttccaccaaaaacacgtaagcaggaagcagctgttctgctcagcttggcaggtgttctttcctaattcttcccaagctgtgagtcagaaagtcctggaaggagttgtaggaagttgtagaggctgggtcactgacctaagagaaggcatcatttggcccactgcacgtcctggcctattcaccaaagcccttcctggctctgactgccacaccaggcagtgggtgaaatgctggctttttccttaagaaattgtgttctagtgccaccaagagatgctgtagagctggctttaccaatctcatgatgcttgcttggcaactctgaaaggtgactttggccaagaagaccttgtggcaattctgcaaattttatacactcatatcttttagggtacaaaatgaaagaacaaatcacaaagaacaatagatccttcaggagctgaaggtaagaatcttttatagctattttaacatatacagtgactactttctactagccaaatatcaaattttacaactaccaccaagccacagattataggtggtaacaactccagaaatgtcctaactaggaaaggtgctcatctagtatgcatcggtatccaggataatatgagttagaattttaaaaatgtcagtcattcaaaaatatttgaactgtgacatcacagaagtaattttatggccttttaaggtaacaacttaaaaagagaacagtactctttttatatcaatgcctttacatttatttaaaaacagtcctaatgctttatagttaaatgtcatatgcagatatgttcaggctctaacatataaagttcctaacttgacaggaaactactgaagattgtgtacagcttaaaaaaaaaaatagggtaactatagtcttgatttttatgtataaattctatcattctatattttaccatcagacatatttctactcctttctttgaagtatgcgaagtatctccaactgcagcatgcaactcattcatttgtaatcaagacgatagtttgaaacacccaattgtaatcagagcaacagttgacttccttttgatagcggagttgaaaatcattgcaattaataaaatggggctattagaaatggaaaacgaataggatctagaatgtaacttcatcatataaatgatgagtgtctttgttatcaacacgttattaagaatgggcaagatgtccttatatactagaagcttttgtaaagtcatgtgtctattgataataaagattttcggaactga

SEQ ID NO: 859 - DNA, 2712 bp, Homo sapiens
ctcacttccctggagccgcccgcttgcccgtcggtcgctagctcgctcggtgcgcgtcgtcccgctccatggcgctcttcgtgcggctgctggctctcgccctggctctggccctgggccccgccgcgaccctggcgggtcccgccaagtcgccctaccagctggtgctgcagcacagcaggctccggggccgccagcacggccccaacgtgtgtgctgtgcagaaggttattggcactaataggaagtacttcaccaactgcaagcagtggtaccaaaggaaaatctgtggcaaatcaacagtcatcagctacgagtgctgtcctggatatgaaaaggtccctggggagaagggctgtccagcagccctaccactctcaaacctttacgagaccctgggagtcgttggatccaccaccactcagctgtacacggaccgcacggagaagctgaggcctgagatggaggggcccggcagcttcaccatcttcgcccctagcaacgaggcctgggcctccttgccagctgaagtgctggactccctggtcagcaatgtcaacattgagctgctcaatgccctccgctaccatatggtgggcaggcgagtcctgactgatgagctgaaacacggcatgaccctcacctctatgtaccagaattccaacatccagatccaccactatcctaatgggattgtaactgtgaactgtgcccggctgctgaaagccgaccaccatgcaaccaacggggtggtgcacctcatcgataaggtcatctccaccatcaccaacaacatccagcagatcattgagatcgaggacacctttgagacccttcgggctgctgtggctgcatcagggctcaacacgatgcttgaaggtaacggccagtacacgcttttggccccgaccaatgaggccttcgagaagatccctagtgagactttgaaccgtatcctgggcgacccagaagccctgagagacctgctgaacaaccacatcttgaagtcagctatgtgtgctgaagccatcgttgcggggctgtctgtagagaccctggagggcacgacactggaggtgggctgcagcggggacatgctcactatcaacgggaaggcgatcatctccaataaagacatcctagccaccaacggggtgatccactacattgatgagctactcatcccagactcagccaagacactatttgaattggctgcagagtctgatgtgtccacagccattgaccttttcagacaagccggcctcggcaatcatctctctggaagtgagcggttgaccctcctggctcccctgaattctgtattcaaagatggaacccctccaattgatgcccatacaaggaatttgcttcggaaccacataattaaagaccagctggcctctaagtatctgtaccatggacagaccctggaaactctgggcggcaaaaaactgagagtttttgtttatcgtaatagcctctgcattgagaacagctgcatcgcggcccacgacaagagggggaggtacgggaccctgttcacgatggaccgggtgctgacccccccaatggggactgtcatggatgtcctgaagggagacaatcgctttagcatgctggtagctgccatccagtctgcaggactgacggagaccctcaaccgggaaggagtctacacagtctttgctcccacaaatgaagccttccgagccctgccaccaagagaacggagcagactcttgggagatgccaaggaacttgccaacatcctgaaataccacattggtgatgaaatcctggttagcggaggcatcggggccctggtgcggctaaagtctctccaaggtgacaagctggaagtcagcttgaaaaacaatgtggtgagtgtcaacaaggagcctgttgccgagcctgacatcatggccacaaatggcgtggtccatgtcatcaccaatgttctgcagcctccagccaacagacctcaggaaagaggggatgaacttgcagactctgcgcttgagatcttcaaacaagcatcagcgttttccagggcttcccagaggtctgtgcgactagcccctgtctatcaaaagttattagagaggatgaagcattagcttgaagcactacaggaggaatgcaccacggcagctctccgccaatttctctcagatttccacagagactgtttgaatgttttcaaaaccaagtatcacactttaatgtacatgggccgcaccataatgagatgtgagccttgtgcatgtgggggaggagggagagagatgtactttttaaatcatgttccccctaaacatggctgttaacccactgcatgcagaaacttggatgtcactgcctgacattcacttccagagaggacctatcccaaatgtggaattgactgcctatgccaagtccctggaaaaggagcttcagtattgtggggctcataaaacatgaatcaagcaatccagcctcatgggaagtcctggcacagtttttgtaaagcccttgcacagctggagaaatggcatcattataagctatgagttgaaatgttctgtcaaatgtgtctcacatctacacgtggcttggaggcttttatggggccctgtccaggtagaaaagaaatggtatgtagagcttagatttccctattgtgacagagccatggtgtgtttgtaataataaaaccaaagaaacata

SEQ ID NO: 860 - DNA, 5872 bp, Homo sapiens
gcagaagcctgaagaccaaggagtggaaagttctccggcagccctgagatctcaagagtgacatttgtgagaccagctaatttgattaaaattctcttggaatcagctttgctagtatcatacctgtgccagatttcatcatgggaaacagctgttacaacatagtagccactctgttgctggtcctcaactttgagaggacaagatcattgcaggatccttgtagtaactgcccagctggtacattctgtgataataacaggaatcagatttgcagtccctgtcctccaaatagtttctccagcgcaggtggacaaaggacctgtgacatatgcaggcagtgtaaaggtgttttcaggaccaggaaggagtgttcctccaccagcaatgcagagtgtgactgcactccagggtttcactgcctgggggcaggatgcagcatgtgtgaacaggattgtaaacaaggtcaagaactgacaaaaaaaggttgtaaagactgttgctttgggacatttaacgatcagaaacgtggcatctgtcgaccctggacaaactgttctttggatggaaagtctgtgcttgtgaatgggacgaaggagagggacgtggtctgtggaccatctccagccgacctctctccgggagcatcctctgtgaccccgcctgcccctgcgagagagccaggacactctccgcagatcatctccttctttcttgcgctgacgtcgactgcgttgctcttcctgctgttcttcctcacgctccgtttctctgttgttaaacggggcagaaagaaactcctgtatatattcaaacaaccatttatgagaccagtacaaactactcaagaggaagatggctgtagctgccgatttccagaagaagaagaaggaggatgtgaactgtgaaatggaagtcaatagggctgttgggactttcttgaaaagaagcaaggaaatatgagtcatccgctatcacagctttcaaaagcaagaacaccatcctacataatacccaggattcccccaacacacgttcttttctaaatgccaatgagttggcctttaaaaatgcaccactttttttttttttttgacagggtctcactctgtcacccaggctggagtgcagtggcaccaccatggctctctgcagccttgacctctgggagctcaagtgatcctcctgcctcagtctcctgagtagctggaactacaaggaagggccaccacacctgactaacttttttgttttttgtttggtaaagatggcatttcaccatgttgtacaggctggtctcaaactcctaggttcactttggcctcccaaagtgctgggattacagacatgaactgccaggcccggccaaaataatgcaccacttttaacagaacagacagatgaggacagagctggtgataaaaaaaaaaaaaaaaaagcattttctagataccacttaacaggtttgagctagtttttttgaaatccaaagaaaattatagtttaaattcaattacatagtccagtggtccaactataattataatcaaaatcaatgcaggtttgttttttggtgctaatatgacatatgacaataagccacgaggtgcagtaagtacccgactaaagtttccgtgggttctgtcatgtaacacgacatgctccaccgtcaggggggagtatgagcagagtgcctgagtttagggtcaaggacaaaaaacctcaggcctggaggaagttttggaaagagttcaagtgtctgtatatcctatggtcttctccatcctcacaccttctgcctttgtcctgctcccttttaagccaggttacattctaaaaattcttaacttttaacataatattttataccaaagccaataaatgaactgcatatgataggtatgaagtacagtgagaaaattaacacctgtgagctcattgtcctaccacagcactagagtgggggccgccaaactcccatggccaaacctggtgcaccatttgcctttgtttgtctgttggtttgcttgagacagtcttgctctgttgcccaggctggaatggagtggctattcacaggcacaatcatagcacactttagccttaaactcctgggctcaagtgatccacccgcctcagtctcccaagtagctgggattacaggtgcaaacctggcatgcctgccattgtttggcttatgatctaaggatagctttttaaattttattcattttatttttttttgagacagtgtctcactctgtctcccaggctggagtacagtggtacaatcttggatcaccgcctcccagtttcaagtgatctccctgcctcagcctcctaagtagctgggactacaggtatgtgccaccacgcctggctaatttttatatttttagtagagacggggtttcaccatgttgtccaggctggtctcaaactcctgacctcaggtgatctgcccacctctgcctcccaaagtgctgggattacaggcatgagccaccatgcctggccatttcttacacttttgtatgacatgcctattgcaagcttgcgtgcctctgtcccatgttattttactctgggatttaggtggagggagcagcttctatttggaacattggccatcgcatggcaaatgggtatctgtcacttctgctcctatttagttggttctactataacctttagagcaaatcctgcagccaagccaggcatcaatagggcagaaaagtatattctgtaaataggggtgaggagaagatatttctgaacaatagtctactgcagtaccaaattgcttttcaaagtggctgttctaatgtactcccgtcagtcatataagtgtcatgtaagtatcccattgatccacatccttgctaccctctggtactatcaggtgcccttaattttgccaagccagtgggtatagaatgagatctcactgtggtcttagtttgcatttgcttggttactgatgagcaccttgtcaaatatttatataccatttgtgtttatttttttaaataaaatgcttgctcatgcttttttgcccatttgcaaaaaaacttggggccgggtgcagtggctcatgcctgtagtcccagctctttgggaggccaaggtgggcagatcgcttgagcccaggagttcgagaccagccttggcaacatggcgaaaccctgtctttacaaaaaatacaaaaattagccgggtgtggtggtgtgcacctgaagtcccagctactcagtaggttcgctttgagcctgggaggcagaggttgcagtgagctgggaccgcatcactacacttcagcctgggcaacagagaaaaaccttttctcagaaacaaacaaacccaaatgtggttgtttgtcctgattcctaaaaggtctttatgtattctagataataatctttggtcagttatatgtgttaaaaaatatcttctttgtggccaggcacggtagctcacacctgtaatcccagcactttgcggggctgaggtgggtggatcatctgaggtcaagagttcaagatcagcctggccaacacagtgaaaccccatctctactaaacatgtacaaaacttagctgggtatggtggcgggtgcctgtaaccccagctgctccagaggctgtggcagaagaatcgcttgaacccaggaggcagaggttgcagcgagccaagattgtgccattgcactccagactgggtgacaagagtgaaattctgcctatctatctatctatctatctatatctatatatatatatatatatatcctttgtaatttatttttccctttttaaaattttttataaaattcttttttatttttatttttagcagaggtgaggtttctgaggtttcattatgttgcccaggctggtcttgaactcctgagctcaagtgatcctcccacctcagccttccaaagtgctggaattgcagacatgagccaccgcgcccctcctgtttttctctaattaatggtgtctttctttgtctttctggtaataagcaaaaagttcttcatttgatttggttaaatttataactgttttctcatatggttaacattttttcttgcctggctaaagaaatccttttctgcccaatactataaagaggtttgcccacattttattccaaaagttttaagttttgtctttcatcttgaagtctaatgtatcaggaactggcttttgtgcctgttgggaggtagtgatccaattccatgtcttgcatgtaggtaaccactggtccctgcgccatgtattcaatacgtcgtctttctcctgcgggtctgcaatctcacctaccatccatcaagtttccatagggccatgggtctgcttctgggctccctgttctgttccattgtcaatttgtctatcctgtgccagtatcacactgtgtttattacaatagctttgtaacagctctcgatatccggtaggacatctccctccaccttctttttctacttcagaagtgtcttagctaggtcaggcacggtggctcacgcctgtaatcccagcactttgggaggccgacgcggatggatcacctgaggtcaggagttttgagacagcctggccaacatggtgaaaccccatctctactaaaaaatacaaaaattagtcaggcatggtggcatgtgcctgtaatcccagctatttgggaggctgaggccggagaattgcttgaacccggggggcggaggttgcagtgagccgagatcgtaccattgcactccagcctgggtgacagagcgaaactctgtctcaggaaaaaaaagaaaagagatgtcttggttattcttggttctttattattcaatataaattttagaagctgaatttgaaaagatttggattggaatttcattaaatctacaggtcaatttagggagagttgataattttacagaattgagtcatctggtgttccaataagaataagagaacaattattggctgtacaattcttgccaaatagtaggcaaagcaaagcttaggaagtatactggtgccatttcaggaacaaagctaggtgcgaatatttttgtctttctgaatcatgatgctgtaagttctaaagtgatttctcctcttggctttggacacatggtgtttaattacctactgctgactatccacaaacagaaagagactggtcatgccccacagggttggggtatccaagataatggagcgaggctctcatgtgtcctaggttacacaccgaaaatccacagtttattctgtgaagaaaggaggctatgtttatgatacagactgtgatatttttatcatagcctattctggtatcatgtgcaaaagctataaatgaaaaacacaggaacttggcatgtgagtcattgctccccctaaatgacaattaataaggaaggaacattgagacagaataaaatgatccccttctgggtttaatttagaaagttccataattaggtttaatagaaataaatgtaaatttctatgattaaaaataaattagcacatttagggatacacaaattataaatcattttctaaatgctaaaaacaagctcaggtttttttcagaagaaagttttaattttttttctttagtggaagatatcactctgacggaaagttttgatgtgaggggcggatgactataaagtgggcatcttcccccacaggaagatgtttccatctgtgggtgagaggtgcccaccgcagctagggcaggttacatgtgccctgtgtgtggtaggacttggagagtgatctttatcaacgtttttatttaaaagactatctaataaaacacaaaactatgatgttcacaggaaaaaaagaataagaaaaaaaga

SEQ ID NO: 861 - DNA, 2223 bp, Homo sapiens
gctctgggagtacgacatggcgcgcgagctgcgggcgctgctgctgtggggccgccgcctgcggcctttgctgcgggcgccggcgctggcggccgtgccgggaggaaaaccaattctgtgtcctcggaggaccacagcccagttgggccccaggcgaaacccagcctggagcttgcaggcaggacgactgttcagcacgcagaccgccgaggacaaggaggaacccctgcactcgattatcagcagcacagagagcgtgcagggttccacttccaaacatgagttccaggccgagacaaagaagcttttggacattgttgcccggtccctgtactcagaaaaagaggtgtttatacgggagctgatctccaatgccagcgatgccttggaaaaactgcgtcacaaactggtgtctgacggccaagcactgccagaaatggagattcacttgcagaccaatgccgagaaaggcaccatcaccatccaggatactggtatcgggatgacacaggaagagctggtgtccaacctggggacgattgccagatcggggtcaaaggccttcctggatgctctgcagaaccaggctgaggccagcagcaagatcatcggccagtttggagtgggtttctactcagctttcatggtggctgacagagtggaggtctattcccgctcggcagccccggggagcctgggttaccagtggctttcagatggttctggagtgtttgaaatcgccgaagcttcgggagttagaaccgggacaaaaatcatcatccacctgaaatccgactgcaaggagttttccagcgaggcccgggtgcgagatgtggtaacgaagtacagcaacttcgtcagcttccccttgtacttgaatggaaggcggatgaacaccttgcaggccatctggatgatggaccccaaggatgtccgtgagtggcaacatgaggagttctaccgctacgtcgcgcaggctcacgacaagccccgctacaccctgcactataagacggacgcaccgctcaacatccgcagcatcttctacgtgcccgacatgaaaccgtccatgtttgatgtgagccgggagctgggctccagcgttgcactgtacagccgcaaagtcctcatccagaccaaggccacggacatcctgcccaagtggctgcgcttcatccgaggtgtggtggacagtgaggacattcccctgaacctcagccgggagctgctgcaggagagcgcactcatcaggaaactccgggacgttttacagcagaggctgatcaaattcttcattgaccagagtaaaaaagatgctgagaagtatgcaaagttttttgaagattacggcctgttcatgcgggagggcattgtgaccgccaccgagcaggaggtcaaggaggacatagcaaagctgctgcgctacgagtcctcggcgctgccctccgggcagctaaccagcctctcagaatacgccagccgcatgcgggccggcacccgcaacatctactacctgtgcgcccccaaccgtcacctggcagagcactcaccctactatgaggccatgaagaagaaagacacagaggttctcttctgctttgagcagtttgatgagctcaccctgctgcaccttcgtgagtttgacaagaagaagctgatctctgtggagacggacatagtcgtggatcactacaaggaggagaagtttgaggacaggtccccagccgccgagtgcctatcagagaaggagacggaggagctcatggcctggatgagaaatgtgctggggtcgcgtgtcaccaacgtgaaggtgaccctccgactggacacccaccctgccatggtcaccgtgctggagatgggggctgcccgccacttcctgcgcatgcagcagctggccaagacccaggaggagcgcgcacagctcctgcagcccacgctggagatcaaccccaggcacgcgctcatcaagaagctgaatcagctgcgcgcaagcgagcctggcctggctcagctgctggtggatcagatatacgagaacgccatgattgctgctggacttgttgacgaccctagggccatggtgggccgcttgaatgagctgcttgtcaaggccctggagcgacactgacagccagggggccagaaggactgacaccacagatgacagccccacctccttgagctttatttacctaaatttaaaggtatttcttaacccga

SEQ ID NO: 862 - DNA, 8776 bp, Homo sapiens
gctttctcgcggggctggctatgccgggtggcggctcccaggaatacggggtgctttgcattcaggaatacagaaaaaacagcaaagtggagtcaagtacacgtaacaacttcatgggcttgaaggatcacctagggcatgacctcggccacctttatgtggagagcactgacccacagttaagtccagctgtaccttggtcaacagtagaaaacccaagtatggataccgttaatgtggggaaggatgaaaaagaggcgtctgaagagaatgcaagctctggtgactctgaagaaaacacaaattctgatcatgagtcagaacaattgggtagcatttcagtagagccaggcttgataactaagactcacagacagctctgcaggtctccctgtttagagcctcacatactcaagcgcaatgaaattttgcaagactttaaacctgaagagtcccagactacatccaaggaagcaaagaaaccacctgatgtggtgcgagaataccaaacaaaactggagtttgcacttaagttaggttattctgaagaacaggttcagcttgtactaaacaaacttggtactgatgctttaatcaatgatattttgggagaacttgtcaaacttggaaataaaagtgaggctgatcaaacggttagtacaattaacactataacacgggaaacttcttccctggaatctcagaggtctgaatctccaatgcaagagattgtaacagatgatggtgaaaatctgagaccaatagttattgatggcagcaatgtggcaatgagccatggaaacaaagaagtattttcctgcagaggaataaaattggcagtggattggtttttggaaagaggccacaaagacattacagtttttgttcctgcttggaggaaagagcaatcccgacctgatgctctcattacagatcaggaaattttacgtaaattagagaaggagaaaatcctggtgttcacgccatcccggcgagtccaggggaggagagtggtgtgctatgacgacaggttcatcgtgaagctggcttttgagtcggacggtatcattgtgtccaatgataactacagggacttggctaatgagaagccagaatggaagaagttcatagatgaacgattattaatgtattcatttgtcaatgacaagttcatgccccctgatgaccctcttggcagacatggccccagtctggataattttctgaggaagaaacctattgttcctgaacacaaaaagcagccttgtccatatggaaagaagtgtacctatggacacaagtgcaaatattaccatcccgaaaggggcagtcagccacagcggtcagtggctgatgaactccgtgccatgtctagaaatacggcagccaaaactgcaaacgaaggaggactggtgaaaagcaacagtgttccttgtagcaccaaggctgatagcacttctgatgtcaaacgaggtgctccaaagaggcaatcagatccaagcataaggacacaagtctaccaagacctagaagaaaagcttcccaccaaaaacaaattggaaaccaggtctgtaccttccttagttagcatcccagctacttctactgcaaaaccccaaagcactacatctttaagcaatggccttccatctggagttcatttcccacctcaggatcaaagaccacagggacaatatccttcaatgatgatggcaaccaaaaatcatggaacgccaatgccttatgaacagtatccaaaatgtgactcacctgtcgacatcggatattattccatgttgaatgcatactcaaatctgagtctctcaggcccacgaagccctgaaaggcgtttctccttagacacagattatagaataagttccgtagcttctgactgcagcagtgaagggagcatgagctgtgggagcagtgactcctacgtgggttacaatgaccggtcctatgtcagctcccccgacccacagctagaggagaatttgaagtgtcaacacatgcaccctcacagccgccttaatcctcaaccgttcctgcagaatttccacgaccccttaaccagagggcaaagttacagtcacgaagaaccaaagttccatcacaagcctcctcttccgcacctggctctgcacctgccgcactccgctgtgggcgcccggtccagctgtcctggcgactacccctctcctccaagttcagcacactctaaggcaccacacctagggaggtccttggtggccacgagaatagacagcatctctgactctcgactttatgacagttctccttcacgacaaagaaagccttattcccgccaggaaggcctgggaagctgggagaggccaggctatgggatcgacgcctatgggtaccggcagacttattccttgcccgataactccacacagccgtgttatgagcagttcaccttccagagcctccctgagcaacaggagccagcctggcggatcccatactgtggaatgccgcaagatcccccgaggtatcaagacaaccgagaaaagatttatatcaatttgtgcaacatcttcccccctgaccttgtgagaattgtcatgaaaaggaatcctcacatgacagacgcccagcagctcgccgcagccattttagtggagaaatcccagctgggttattgaaagatgatgcatctttgtggtgtttagtagttttttgttcagctcaaatgctgagggaggtttgctacaatagcacatgtgatctccttctcagcaaggaggttatatagtatccatttatgtgaaatactgtatcatggaatctgtatgtatagccccacatggtggaagtatcacgggattgctttacatttaaactttttttttttaacatttcctttttaaagctatatccttggctggaaatttttccagtttgatttaatagatgtatctgtgatctttgatattaatctttggtgcatcaggggtttatatgcagcactttttatccttgttttgtgttttattaacttggtgtttgtctatcaattgcaagcaattacaataccttcagaatgtgggacatttgactagacctagcaaactgttttttcgagccaagcttagttagactcttttacagctttttaagttatttttatttggggaaagtgggcttctttgtgctataatcattatttatagaaacaaagttatactacagcactgactttatattttaaacagaatgtaagttaccagttttatgttgaaatgtgttacagtatatatatattagaatgatttacaatatggcacttttcgatgtgttatttttgtttggatttttttttctgttaagaaattagttaatttaatatggtcaatttaaaagaaagcagatgcaatcaatggaaaaatgtttccattttttaaaaatgaataaggcaaaagctgtaactgttacaggttagagctttgttatccagctatgatgtgcttcttgacagtagaagtggaattgaattcctagatttccattaacctgtatttttaatatgtctgtctttttgttttggggcacaacaatactggataaaataaccctttcacagcacttgcctgtttttaatgaatctaattattcacaatgcaacttttatatttaacatactctttagctttcctgctatttatcaaggctggcctgaggtgggtttatgtgttgaggttatgcaacatttcttgatactgcactatagagaaatggtgatggaggagttgtaaatggtaacttaaaatttttgtaagatattgtatattttccattttcctgaaggtagttttcttgggggggcctgttatattattaaggccagactcttgccacaaatagtgtagttttagatacagactaaggtctgttctagtattagtaagggatatttctggtttcaaagtcatgggttttgctagtggtgaatacatttctgcggagtagaagatagattttgcagtcagtggcagacagttgtgtgattgacatcacttgactgttgcgtccaggttttgaattgtacttcacgtaacagatgcattcagatctttttctgtagtctgcttagatgccctggctattctgattatcctacatgctacagtttgaagtgaagccctgaaaaaccagaaagtaccttttactgttgatacaaattgtatctttttaactataagaactattttgatttgtagatctagttaaaacacaagtatgtaactatgattagacttttgggcaacattttatcccttatttaaatacaaatttttaaagtaaaattgaggtctagaatagattagaaaataaaaataacaatttagataaatagaaatgtctgtcttagttttatataatatattaaaacacagtaaataaatttattggcattttctttctcctaaaacttacctagtgtgaacttaaaataaaggtaaaatgctgcctgaaaataatgtccaagcacctttgactaggataacattttcactacttgtgtgacactgtgtgttgcacgaagtaggatttgggtatacagtaaatgcttctaaaaggcattgtgcatattgacataaccaataatctgaaccgtgttcagcaaacttaattcaggaaagtggtattctacacaattattgctgttgtgtttgaaatgagtgtggcactcatctgtatccagaaataatatgggtgaggccacacaacccattctgagtggtgtctgtctgaaagcaaccctactcgcatgtgaaattgttctccttgatttggtcactataaagcaagtttaaatgtagaggctaactcagtgccaaaaacagggttacaaatgtgtagtatcttttattttagtcatattctaagacttctttttagtatgaaatcacttttaaattatacatgtaggttttgcttccattttcttcattttaccattttaattatttgaacattcgccaaattttacatttatttaaatgagatcttaggtgagatgtgtgtgacactttgaatttgaccttcttgtgttattagctgactatttgtcattgcctcatggattttaaattatgggaaaatagtgtagccagctgccacctctactgaagtgagtagctctgaactacccacactaaatccttcagtgtaattaattatgagtttaaaaatagcagttttcttatgtgaagaggacagtttgtcccctttttttgaagcaccgatgttgcgttcagagctgtagaatgagataattggcagactttaggtacagcaaattcttacttatctaaagcaataagtcaaaggagtccatcattaaattaaatccatagctgatcacaagccttcattttagccaaaactttctctctaaccaaatcttttaccagacttgctaataaataaccagagagatgtgttaataagtgaagttgccagaaatggtcaactgatcggaaaaaaaaggattcagactggagtattttgcccctgaataattgacagttgactgtgctttacacagtaactagccagtctgttgtctctgtgtcttagtccagagggaatagtacccaattggccaaatactggcccttagtatctcctcctttcttgcatgggatacagacgttttcagtcttgtttttatgatctctctctatatcctgataagagtttgtcattgacttacacatttggaagaaatgcacaccagtgtaatatatttgatactggtggaaacttgaactttgtgtttttatgaaaattcatttatgagaatatgtaatataactgaagagtattttatgtatatctatatacacaaatatgtatttgttatgaggtattaaaaacaggggttggggggagtgcttctgatggctaacttttctctaattaaactatgtttctttgagttgtgaacgaccgagtctggggtctggacggccaatgataagatttagaaccacttggatggaaagcagttcttcactggttttattcttggtattttcaaagaattattttgatatttttaatagaatgtgtaattttaaaatacacaaaaaacttaaagtagtattgattatacaaataattatttaacatgtcttatggatgtatctatatgtatatagacagtaatatatttataaaacaaatatactttgcttatgttatagctcttagtttgtgacaggtgggaggatggctctgggtgtgtgtgtgtgtgtgtgtgtgtgtgtgtgtgtgtgtgtgttttgaaaactctcaagctgttttccctctgatttacaatggtatttactttaaagtatgtttggttttcattattctttttgctctccaacttccttattcaagataaaataagacatacagttttctggccattctgttggtgtgtggtgcacccattttattgtcatctaactcctggagaattcccacgtgacctgaaatcaaacagattctggctggacatatgcttatgttccaaatatattaaagatgttaattcagctaacagttaagtttccaaggtatacaccaacaaataaaatgaggtattaaaaagagatggattacacacatgcattagaataagagaaaacagtagtgttaataaaagtaaagaaacatacactatcttagccccctagggcaggggttgactttttctgtaaaggatcagatagtaaataatacaggaatcatatggacttcaaatgccattgtaaaaactactcagctctgcctttagagcataagaacagccacagataacatgtaaattagtgtggctgtgttccaataaaactttatttacagaaacgggaagccggtcagattgggcctgtgggccataatttgctgatctcaagcagtaaatcctggtatatgttaatagaagaaatcataattgcatttcagttgacattaaaagaaaatctggtagtttttgatgtccttcaaaagaggattgttagacattgatgttaaagcatcttaattcatttgagttttcttacctgtttacacccattatttattagagatatttcttgtgtttaaccacaaaaaaaagcactctgttaaaatgttttaatatgtattgaatttctttcataaacttttcatttctgttgataaatgggaatcccttaccaaccttttgttttttaaaagtctcatagaccaaaaaaaatctgttgcagcatttaattagccacagatacattttggctgcatttaccagttacatttttccattggttttggcttctaataaataacatatctgccattctttaaaaatgattttaaagaagataaatatattgtaatttcacatgctatagctttattctgtaagattaaaaattgtgactagtataattgtagctataatgtgagtggcatgttacaatgtaactctttatgagaaataaaatgtatctctgctttgtctgtccagatctttaggatttttagatgccttgggactgtccttggtgaatgatattcttcatatgatcatatgtaattttgaattcgttggaagtacacgctgctgagcatgtttattcacagtgctttataccgggtgttgcatcagtaatcattttcataagaacatttaaacagcatgaacatcatcatccacttaaatagttaaactttcttttaaaattggaatgcaactgtaggttttaacaatgtttattgttttttaagtggttactttgtttttccttaatactttctgttaacttaattattactcctgttgcagtgttactgttatgtattagaagtggcttttccccctaagatccttagtcttttaaagacaatttaaggtattggccatttggcagtagaaaatgtgcatgttttaacttggttttataaaatctgtaatgtttcacttcttgaaccatgtaccaaatttgccaattttctgtccaagtgtttcagatgaataacaaaacgctgttcattgaagctttcgccacctttcttaaagcagcgtatgttccaagggaaaaaggcattgaaaagcaatcgtttgtttttatgaagaataggtgttcagattccttcagtttttttgaaattagaaatttcttaccttatgtgaaatattcacaaacgtgcacacttctgcagagacaaagcatttcactgcacgtgtaccaggttattgattttatcttttcctttcagggttttgtcctcccaaaccagagtcatatgctgctagtagaattttttatttgatcctgcgaacttttcttataggaaaagtaaggcaaaggatgtgtagtgcaaccatctgataaactagtgtgattgtatttatcctctgttctgtgtatttctgtaatggaatctttacaattcccaaaacggtattttagacctactggaaatctgtatcgaaacagctatgtgattctgccactgagaaaaaaaaaatttttaattcgtttttcttatgctggtttgtttttctttaatgaagaaattgatctcatatggcatcatagatgctaaataaataaaagcatcatacttctctagtttgcctgcattcagtggctaacattatgagcattgtgtaagataaacacatggtcagtatcaatgtaaatgttagagccatgattaattcctatgaaaattgaaattaaatgtcaaagacaactagacataa

SEQ ID NO: 863 - DNA, 1308 bp, Homo sapiens
gccgtggccatggagctctggaagctgggctgggggaggaagcctggtggctctgacctcccctggaggcgaaggaggcccagccatgacactcttaacggatgccacgccgctggtgaaggagccccatcccctgcctctggtcccacgtccctggttcctccctagcctctttgctgccttcaatgtggtgctgctggtctttttcagtggcctcttcttcgcattcccttgcaggtggctggctcagaacggggagtgggcctttcctgttatcacaggctccctctttgtccttaccttcttcagtcttgtttcactcaacttctcagaccctggcatcttacatcaaggctccgctgagcagggccccttgacggtgcacgtggtgtgggtgaaccacggggccttccgcctgcaatggtgtccaaagtgctgcttccaccgcccgccccggacttaccactgcccctggtgcaacatctgtgtggaggactttgaccaccactgcaagtgggtcaataactgcatcggtcaccgcaacttccgcttcttcatgctgcttgtcctgtccctgtgcctctactcgggcgccatgctggtcacctgtctcatcttcctggtgcgcacaacccacctgcccttctccaccgacaaggccatcgccatcgtggtggccgtgtccgccgcgggcctcctggtgccgctgtccctcctgctgctgatccaggcactgtccgtgagctcggccgaccgcacctacaagggcaagtgcagacaccttcagggatacaaccccttcgaccagggctgtgccagcaactggtatttaacaatttgtgcaccactgggacccaagtacatggctgaagctgtccagctgcagagagtggtggggcctgactggacatccatgccgaatctgcaccctccaatgtccccctctgctctcaaccccccagccccaacctctgggtccctacaaagcagggaagggacccccggggcgtggtgaggctgcagctctccaggagttccacacgggcccagtgctgcccctgctgctgcaggagcccccaggcgaggttcggccttcctctcgcccctgtgcacccggagatgcccacagcaccagcacctgagctcacctccgaacccgcctcctgaacccgcctcctgaacctgcctccttacctcccacttcctgagccctgagtggaagcctttctgtgccttgccctttgcccactcccctggtgggactgccaagaccctcaatgcccattaaatactcttgcctgcctctta

SEQ ID NO: 864 - DNA, 7209 bp, Homo sapiens
actcgccggcggcagtgaaaggacgcgccggagccggttttccagataacagaaagtaacgtgaaggaattcaggtgactcagacatggaggagagaagacctcatctggatgccaggcccaggaattcccataccaaccacagaggccctgtggatggagagttaccaccaagagctagaaatcaggccaataacccaccagccaatgctctccgaggaggagccagccaccctggaaggcatcctagggccaacaaccatcctgctgcttactggcagagggaagagagatttagggccatgggcaggaacccacatcaaggaaggaggaaccaggaggggcatgccagcgacgaagctagagaccaaagacatgaccaggagaatgacaccaggtggagaaatggcaaccaggactgtaggaaccgcagaccaccatggtccaatgacaacttccagcagtggcggactccccaccagaagcctacagaacagccacagcaggcgaagaaactgggctacaagttcttagaaagtcttctgcagaaagacccttctgaggtggtcatcacacttgccacaagtttagggctgaaagagctcctttctcattcttccatgaaatctaacttccttgagctcatctgtcaggttcttcggaaggcttgtagctccaaaatggatcgccagagtgttctccatgtactgggcatattgaaaaactccaaatttctcaaagtctgcctgcctgcttatgtggtagggatgatcactgaacccatccctgacatccgaaaccagtatccagagcacataagcaacatcatctccctcctccaggaccttgtaagtgtcttccctgccagctctgtgcaggaaacttccatgctggtttccctcctgccaacctctcttaatgctctgagagcctctggtgttgacatagaagaggaaacggagaagaacctggaaaaggtacagactatcattgaacatctgcaggaaaagaggcgagagggcactttgagagtggatacctacactctagtgcagcctgaggcagaagaccatgttgagagctaccgaaccatgcccatttaccctacctacaatgaagtgcacttggatgagaggcccttccttcgccccaatatcatttctggaaaatacgacagcactgctatctatctggatacccacttccggctcctgcgagaagatttcgtcagacctttacgggaaggtattttggaacttctccaaagctttgaagaccagggcctgaggaagagaaagtttgatgacatccgaatctactttgacaccaggattatcacccccatgtgttcatcatcaggcatagtctacaaggtgcagtttgacacaaaaccactgaagtttgttcgctggcagaattccaaacgattgctctatgggtctttggtatgcatgtccaaggacaacttcgagacatttctttttgccaccgtatctaacagggagcaggaagatctctgccgaggaattgtccagctctgcttcaatgagcaaagccaacagctgctagcagaggtccagccctctgactctttcctcatggtagagacaactgcatactttgaggcctacaggcacgtcctggaaggactccaggaggtccaggaggaagatgttcccttccagaggaatatcgtggagtgtaactctcatgtgaaggagccaaggtacttgctaatggggggcagatacgactttacccccttaatagagaatccttcagccactggggaatttctaagaaatgtcgagggtttgagacatcccagaattaatgtcttagatcctggccagtggccctcaaaagaagccctgaagctggatgactcccagatggaagccttgcagtttgctctcacaagggaactggctattattcaaggacctcctggaacaggcaaaacctatgtgggtctaaaaattgttcaggccctcctaaccaacgagtctgtttggcaaattagcctccagaagttccccatcttggttgtgtgttatactaatcatgctttggaccagtttctggaaggcatctacaattgtcagaagaccagcattgtgcgggtgggtggaaggagcaacagtgaaatcctgaagcagttcaccctaagggagctgaggaacaagcgggaattccgccgcaacctccccatgcacctccgaagggcctacatgagtatcatgacacagatgaaggagtcagagcaagagcttcatgaaggagccaagaccctggagtgcaccatgcgtggtgtcctacgggaacagtacctgcagaagtacatctcaccccagcactgggaaagtctcatgaatggaccagtgcaggatagtgaatggatttgcttccagcactggaagcattccatgatgctggagtggctaggtcttggtgtcggttctttcacgcaaagtgtttctccagcaggacctgagaatacagcccaggcagaaggggatgaggaggaagaaggggaggaggagagttcgctgatagagatcgcagaggaagctgacctgattcaagcagaccgggtgattgaggaggaagaggtggtgaggccccagcggcggaagaaggaagagagtggagcagaccaggagttggctaaaatgcttctggccatgaggctagaccattgtggcactgggacagcagctggacaggagcaagccacaggagagtggcagacccagcgcaaccagaaaaagaaaatgaaaaaaagagtgaaggatgagcttcgcaaactgaacaccatgactgcagccgaggccaacgagatcgaggatgtttggcagctggacctcagttctcgctggcagctttataggctctggctacagttgtaccaggctgacacccgccggaagatcctcagctatgaacgccagtaccgcacatcagcagaaagaatggccgagctgagactccaggaagacctgcacattcttaaagatgcccaggttgtaggaatgacaaccacaggtgctgccaaataccgccagatcctacagaaggtggagccgaggattgtcatagtggaagaagctgcggaagtccttgaggcccataccattgccacattgagcaaagcttgccagcacctcattttgattggggaccaccagcagctgcgccccagtgccaacgtgtatgatctggccaagaacttcaaccttgaggtgtccctttttgaacggctagtgaaagtaaacattccctttgtccgtctgaattaccagcaccgtatgtgccctgaaattgcccgccttttgaccccccacatttaccaggatctggagaatcatccatctgttcttaagtatgagaagattaagggggtgtcttccaaccttttctttgtagaacacaactttcctgaacaggaaatccaagagggcaaaagccatcagaaccagcatgaggctcactttgtggtagagctgtgcaagtacttcctgtgccaggaatacctgccttcccagatcaccatcctcactacctataccgggcagctcttctgcctgcgcaaactgatgcctgccaagacatttgctggcgtcagggtccatgttgtggacaaataccaaggggaagagaatgacatcatcctcctctcgctagtgcggagcaaccaagaaggcaaggtgggttttctgcagatatccaaccgcatctgtgtggccttgtcccgagccaagaagggaatgtactgcatcggaaacatgcagatgctggccaaggtgcccctgtggagcaagatcattcatacacttcgagagaacaatcaaataggccccatgctccggctctgctgccagaaccaccctgaaacccacaccttagtatccaaagcttctgacttccaaaaagtacccgaaggaggctgcagcctgccctgcgagttccgcctgggctgtgggcatgtctgcacccgtgcctgccacccttatgactcttcacacaaggagttccaatgcatgaagccatgccagaaggtcatctgtcaggaagggcaccggtgtccccttgtttgcttccaggagtgtcagccttgtcaggtgaaggtgcccaaaaccattcctcggtgcggccatgaacaaatggtcccttgttccgtgcctgagtcagatttctgctgccaggagccttgctccaagtctctgagatgtgggcacagatgcagccacccatgtggtgaggactgtgtgcagctgtgttcagaaatggtcaccataaaactcaagtgtgggcacagtcaaccggtaaaatgtggtcatgtggaaggcctcctgtatggtggtctgctagtcaagtgtaccacaaagtgtggcactatcttggactgcgggcatccttgcccaggctcctgccacagctgcttcgaagggcgtttccatgaacgctgtcagcagccctgcaagcgcctgcttatctgctcacacaagtgccaggaaccatgcattggtgagtgcccaccctgccagcggacctgtcagaaccgctgtgtccacagccagtgcaagaagaaatgtggggagctgtgtagtccctgcgtggaaccctgtgtctggcgctgccagcactaccagtgcaccaaactctgctctgagccctgcaaccgacccccatgctatgtgccttgtactaagctgctagtttgtggccacccctgcattggtctctgtggggagccatgccccaagaaatgccggatctgccacatggatgaggtcacccaaatattctttggctttgaggatgagcctgatgcccgctttgtgcagctggaagactgcagccacatctttgaggtgcaagccctagaccgctacatgaatgaacagaaggatgatgaagtcgccatcagattgaaagtctgccctatctgccaggtgcccatccgcaaaaacctgaggtatggaactagcataaaacagcggctagaagagattgaaatcatcaaggaaaagatccagggctcagcaggggaaatagcaaccagccaggaacggcttaaggccctgctggagaggaagagcctcctccaccagctgcttcctgaagacttcctgatgttaaaggagaagctggcccagaaaaatctgtcagtgaaggacctgggtctggttgagaattacatcagcttctatgaccacctggccagcctgtgggattccctgaaaaagatgcatgtcttagaagagaaaagagtgaggactcgactagaacaggtccatgagtggctggccaagaagcgcttgagcttcactagccaggaactaagtgacctccgaagtgaaatccagaggctcacatacctggtgaaccttctgacccgctacaagatagcagagaagaaggtgaaagatagcatagcagtagaggtctatagtgtccagaatatccttgagaaaacatgtaagttcacccaagaggatgaacaacttgtgcaggaaaagatggaagctctgaaagccacccttccctgctctggcctgggcatctcagaggaagagcgagtgcagattgtcagtgccataggttatcctcgtggtcactggttcaagtgccgcaatggccatatctatgtgattggcgattgtgggggagccatggagaggggcacgtgtcctgactgtaaggaagtgattggtggcacaaatcatactctggaaagaagcaaccagcttgcttctgaaatggatggagcccagcatgctgcctggtctgacacggccaacaacctgatgaactttgaggagatccaggggatgatgtaggaagatggtacaccactgccttttgccctcgccactgaatgactggggccagctccctaatgaaggaactgaagtttgttttttattatcatcctttttaggctgggcgcagtggcttacgcctgtaatcccagcactttgggaggccgaggcaggcggatcacgaggtcaggagttcgagaccagcctgaccaacatggcgaaaccccgtctctactaaaaatacaaaaattagctgggcgttatggcgggcgcctgtaatcccagctacttgggaggctgaggcagaagaatcgcttaaacccaggaggcggaggttgcagtgagctgagatcatgccattgcactccagtctgggcgacaggagcaagactctgtctcaaaaaaaaaaaaatcattctttttagtcttagcacctacttaaggatccacttttagggctcacccacatttgtttctagatttacccctgcgctagagtaagcactttatctccagaactgagagcaaagttaacaaatctcaccccttctctcctgcaaattagtggacagactccctggaacatgtttggggcttccacctagggccacctagtggtatctctgggtctttacttggtcagatgtttattctacattgttccccaggaacagagtatgagctcattgatgcagaccgattctaattgccaggccctaatttgcagactaactctcataataaacagaggcccatagttgtttatgaactgcttatcccttaaaggagcacaagaacccctccctgccctccttgggcaccctgcctccaggagatggaggcacgtgataagacaaaagactgcaccaactcaccctgacacagttacatagtcactgagagtggggaagatgggacagcccacatgctgcataagatgggccttatgcagcaggcccaggtcgtcattaaggagtgacccctttcctgtaacctgcactttgggatggtagaagtttctttacctgctgacaggtttggtggcactgctggttacccctgggccctgaatggagctaaaatcacatttggtaccagcagcacctatcccaagtgtgatccttcatcccaacactccctcttggagctgttccctgggtagagctagcatgccagcagcttctgcaggctccaaacccaggccagaagccagacccaggcctgctgcctgcatctgcattccctccttccagtgttccttagaacagacatttaggtatctcaggtcctttctaagtgtccctttcctatgtatgcatttcctttttttgtctttactatgcactttagcttataaagccaattaaaaacaatgattgagaaaa

SEQ ID NO: 865 - DNA, 1258 bp, Homo sapiens
agacctcactctggccttgctgcttctctccagctcctgaacttttctttcttccatcatgctctgagcccattccttgaaaactaaaaggtccctgactcccagtctgcagccatcctgggcctgctgagctctgattcaagtgcctgcctctgccccttggtgggctgaagcttcatggaggaggagcttgccatccaacagggtcaactggagacaactctgaaggagcttcagaccctgaggaacatgcagaaggaagctattgctgctcacaaggaaaacaagctacatctgcagcaacatgtgtccatggagtttctaaagctgcatcagttcctgcacagcaaagaaaaggacattttaactgagctccgggaagaggggaaagccttgaatgaggagatggagttgaatctgagccagcttcaggagcaatgtctcttagccaaggatatgttggtgagcattcaggcaaagacggaacaacagaactccttcgactttctcaaagacatcacaactctcttacatagcttggagcaaggaatgaaggtgctggcaaccagagagcttatttccagaaagctgaacctgggccagtacaaaggtcctatccagtacatggtatggagggaaatgcaggacactctctgcccaggcctgtctccactaactctggaccctaaaacagctcacccaaatctggtgctctccaaaagccaaaccagcgtctggcatggtgacattaagaagataatgcctgatgatcctgagaggtttgactcaagtgtggctgtactgggctcaagaggcttcacctctggaaagtggtactgggaagtagaagtagcaaagaagacaaaatggacagttggagttgtcagagaatccatcattcggaagggcagctgtcctctaactcctgagcaaggattctggcttttaagactaaggaaccaaactgatctaaaggctctggatttgccttctttcagtctgacactgactaacaacctcgacaaggtgggcatatacctggattatgaaggaggacagttgtccttctacaatgctaaaaccatgactcacatttacaccttcagtaacactttcatggagaaactttatccctacttctgcccctgccttaatgatggtggagagaataaagaaccattgcacatcttacatccacagtaatgagtcataatattatacaaattcagagtgttattaaagaggtattgaaatattt
